United States Patent Application Publication US 2026/0258423 A1 - sequence listing, part 77

SEQ ID NO: 301568 - DNA, 83257441 bp, Homo sapiens (residues 81,122,667-83,257,441 of 83,257,441)
  source 1..83257441: mol_type = genomic DNA
gccgcccccgccgggccgcagagagcgccagcgccgttcaaactcctcctctgcttcggtggcgcccttggcacacaggtaggacagcagcaggtgcacctcctcggctgtgggccgctgctcgggctgcagccagcagaactgcatcacctcgtacctgcgaggaggtcccccgggggccacgtcagaggcaacgctggccaggaacgcgtccctggagcagggatgggggttcccctaactcccagtgtcttgggggcattaagggtatctcccacttaattgacaccccaaatctgccaaggcaagcccagcagcgtgggagcaggaggtgggctgggcactatccttaagccttccctccctgtacacaggggtgcagaggtggcgggtggaggccctaccagaggggaggggagaccaggcagggctggaacgccagggggtcagggtgagccgcctctgcctggggatcaggataccccatctcggcctggctgtccgggacagggcagtggggccctcaccagcggtccgacagggtcagctgcagctggggcttgggcagcttgagctgctgctcccggaccgtgtacgccagcacctgctggtccgagtgctggggatagggctgcgtgcccagctcaaagagctcccagatggtcacgcccagggacctgtggggcgacagccgtgagccagggctgggcacagcctgccacagcaaggaccgcgcaggatccccggggcgccgaatggggcagctcccgccatcacgccagtgcctcaggaccggggcctggtaccataccagccgcccctccctgaggacagcgcgtcctttcagcaggcaatgtgcaccctgccaggcccaagcccagcacctgtggagcctgcacataaaggccgggctggccgaatccatctgcttgtccactcattcattcattcactgatgcactgaagaccagacactgcccggtgtgggagctgccctgggggagctggagggcgggcgtggagcccaaagcggagtagggcccgcaccagcagggggctgagggagggggagggagggggaaggaaggggagagaggggacgcctcaggccagcatgggcagggctgggtaacaggcaggggtgcacagagcgtgcaggcgggtagggtaactggggtctccttccccgtgggctgtggcttcacccagccactttggtccctggctgtcccaagaggctgcagagtgagacagaggtgatttggcaagacgtcaccatgaccttggccagagccctgtgactggagaccccagccagcgtgcagtgggtgggcaggccaggaaggggcaccttggtggagaggtgaggaggggacagtgtccatgatggggcagtcaagtggcttaggggaggccccaaaagctcagggagggggcctggcccgtgggatctgagagttccccagaagcagaaggcggccagaccaaagcccgggagtggtgggggcggttggggaagcagcagaggtgaggcagggaggggcgcccaccccggggcggaccactcccctggcggctcggccctgccccttccgagtctacaccaggtgtgaatgaacgctccgggctaggcactcaggataggggcttccaggctgcggccgtgggagatcccagcaccaccgtcagcccctctgcctggcacggcccgacctacgctcccgtgaaggcagccaacaccccacccagaccctctccccagggacaggtactcaccaaggcccccgtctcaggacagaccccccggcatgctgaagacgggccgttggccctgtacgtatgccttgaccccaccatggggtccctggggcaccctgtcagggtggtatctcccccggtgtggggtcgccacccaaccagccacttgggctgctggcgtgtggccactacaggtggctccggcagccccctgacctcactactcatggccatgatttgacatgggtgggcaggtggcactcggcctcggcccctcacggtgccaccagggccgcactcaccacacattcccgctcttggtctggtccacgacgagcaggttgctatgcacctcgtccaccagctctggcgcgatccagcgcagaggcacccacagctggtcggcagtcacgaagtagtcctcctgttggcacagggacgggtcacccctgccggcgcaggccctgcccctcatgcccagcccagcccaccccaccccactcactctgtacttgcagtgagccaggccatagtcaccaatcttcaccgtcaggtcagccgtgagcaggcagttccgcagggccaggtcgctgcaggcaggggcaggggcaggggcagggtgagcagggtgagcagggtgtgccgggtgggggcagggggagggtcagtggggtgtgccgggcgggggcatccagcacagggtcctttgccaacacttggatggctcacagtccaggctggaaggggcgttggagacactgccaccccccatccctgcccagggccctactctgtgcccaaccctgagacctggggagggactgtgtgcgtgggcctcaaatgttacagtgcagaggagaatggggcctagagagggtgagaacctgccggaacccacccggaccggtccacgcttctccaggaccctctcctcctagctctactacactatcactctcggctccccaggaggtgggaattgatggggaaactgaggcctggagtgtcccaggggtcctgccggctgccggagtccagttttagggtccagccctgccatgcccactcagagctggagctcactctcacttgagccaccactggccccagggttgggtagggtctggaaagaatgcaggttacgcctggcactacctccaacccagcctgccttggctgctggctttgaaccctgcctggctggtcacgtgggtgtgaggaggcacagggtactgggtagatattaccacagctgccgtattacttctgtgctcaggactcagggtggggacagaggccaacccagcctgtccctccccacataaaacccatgtctgcgtgccaggggatcgctacagggccatgtgtcctgggcctagggggtggagtggggtgggttggggttgggggcagggcagctggggcccggcaggcaggtcgggaggctggcagctgccctcttcaacaaaatcactgatgctggagtcgcctgagtcatcactcagcaccaggatattgttggagaggacagccgtgcggcgtctggggctgacggggccacgtgtccttcgccacttcttccagcatgtccccccggggtccccaggggctgggcatcctggcccaagcaggacagaaccctccctccagggtccttcgaagcagggtctgtctccctcaagccccaaagcgagggcttagcagagtgtggggttggcgcggggctgcagggtgctggctgactgcctcggggacagagaacaggccagcttgacagtacgcatctcttcgtctaaacctgcaaagtgggtgtcaaaccattgtcttcccaatttttcaaaaacgtcataaaatccctctgcatagtggttgtctgatgctgcatgagatgaacctggccggtcctcgcaagccccctgaggcaggacccgccctatgcccttccttcaggggaggggcctggcctagggcttcccggccgctggcccgcgcccgccctcacctgtgcacgaaattgttgcgatgaaggtgcaggacgccacaggccacctcacaggccatgcgctgcagggtccgggggtcgggagccatggactccgccacccggcagctccgcaggtagcccttgaggtccccctgcagaaagggggtgtggcgcagtcaccagcaggctgggggctggccaccctgggaggtccccacctacctccccaactcctccacccctacccacagctgagggacagcagctgcccagagcagcctcgtgccctgcacagtggccagcacccagcagttcctggaggggggccgtgtcccccagggctgggctggactgaaggcttcctctccactgcccctcagccagccccgggcagcaggagtcccttggcctgtggtagagagagaaacacagggcccaagtggatctgcttgatggagtctggggctggtggtcgagggttggccggcagcccctgacctgccgaaagcccagccccgggacggtcaacgtcaggagtccagacgccagtgtgtgagggcccctgtcccgagggaagccagcaggggatccagcccagccacagacagcctcggctcagtgcaggagctgcatatgtggaagggggtggggggcaggtctcgggggagggggagacgggtccccggggcaggggggcgttgatgggcaggtctcagggggagggggggacaggtccccggggcggggggcgttgatgggcaggcccagaactccaggcagcctggggaagtggccaggcccagccccccatggcaaaagcaagcctgagtgaggccgtggagcccaagtgggccagtgcccccccccagttggcccaggatgcctcctcctgaaccacagggcacacaagcaggtgaccaagcagctggcagctccccaggggtgcagggagccccagcccaggcctgttctgtgcccagcccccacagtccctccctggtgaggctaggtctccccatcgcctcctctggaaggtggtgggggcagggtccctgggtcttggctttagggaggatgtgaggcccccaaggagggggtggcaccagacactggcagggcaagggagggccccggctcagcaaagaccccagcatccccccgggcagcagctcaccagtgggcagaactccatcaccagcaggtagggcgtcacctcggcgcactgggccaggcactggagcaggttgctgtgcttcagggccctgcgggagtggacaggcggcccctgacttgggaggaggtggggagggggagtcgggccgagcaggggagggagaggagggggccgcacagcacaggcctttgtgcccggtggcctcccacctgtagggctgcacctcctccaggaactgcatctgctcctgcacgctggcactagcctgcagctccttcaccaccacctgggcactgctgatgccagagttcacctcccccaggaacacctgtgggacagacagcatcacccacggctgctccgcctccaccggccccggcttccaggccttactcttctcccacccgccccacgccggcccccaggacaggacacttctcctcctgtgccccgtccactcattgcagcgtgaggtatggcttccggatccctcccggcaaccctctggctgtaatattctgagtctttcgtgttactctccccacaaggtcccccgctgccctctctctctctctctctgggggtttgaagtgaggaagagggacccaggtgtctcgtttaggccaaggtcaggggaaggccatgagcaagaggctgctcctctccctcccagggcccctccccaggtacctctgaccccaggaccccctagggagaaggggatgcagccagatgctgaggacctccctggggaagggtccagcagggcccagagactgaagaagggaccgtcggggctggggtggctcctaggaggagcaggtctgcagccctgtgtcccttctgcctcccaggcgggagtcctccctcccaggcgggacacgtaccttcccgaaccagccacggccgatttccttcaggtacaggaggctgtgccggcccacgtctgtggacttgaggagctgcactgtaaccaagcagggggttcagggacccagtgtggcctccgcaccccccagcttcctcacccggcccctggaggggctgcccgcttggccttttctgggaaactgtcctgagtccctagcaccagctggcaaccttggggccaccatcaggagccagggtctcttgagagcaggggccgctgcttcccagaaaagccacggagctgcaggatccatccgggcatctttctgggtaggtctggagaaggtgcctgaagccactgggatagcccggccagggacagcagggcccggagctcgacccgtcacatgggctgcaccaggcaggcagtgtggctgagcaagaggctggggccacggcacagagagggcactggagcggcccacccccaccctgccgcaggctggcatcccacgccgggcgcaccaaaggctcctttgttgggggctgcttggcacggccccgcacggagcacactggcccattctccccgagggccaggccgggtgaggtcagcgggaggaagggtcagtgaggcccgggacgaaggggccagcgctggcagagcccactcatgcctgcccacgccccgagggattccccgaattctgctcccacgtcaactgcccagagggctgacaggcctgggtctgagcctggctgccaggagagcccagggggagggggctccttccagggcctggagacccagagaatgtagaggcggggcagggcagaattgagcgtgtgggcccaccgggtgctgtgtcctgagcccagcctgtctgggcggccctctctcaccctggggcgcccaggcccacactgtccctgagcaagtgtgggggtcctgaccatgggtgctgagacagttcagaggccctgggcactgccggaggcagcaggcagccgtccttctctgcggtccccagcgggtggggccattgcccaggtttctccccgctgacctctggggctacttttctgacctcaccccaatctctctcctccctagaagcacattcctcccccagaaaactgaaaccagagctgcaaaagtagagagacaggtaaccagtgccttctttcgggctcctgttcgccaaccccagtccccacagcaatcctccagaggtggctctgagaatcttcgggggccaggcacacacctgcccctggacccaagggcagtaccccctcggatggtccctggcagctcccagcagggtcagcacagggctcagggacccccacagccatccgggaaggtccgagggcctcacgctctgagtgggtggctgcagtcctccgcgcccgcccacagatgtactcgagctcaagtgccagccctgattcctgccgaactgggaacctgtcctccaggagatggggcagagtaggacaggcgttgaggccttggctccaaagctgggggctgggggccctctctaggtcccagaccagtgccttgggcctctcagcccacgatgaaggctaggctctcagggcccagccaggcacagttcatagccagctctcagggtccagccaggcacggctcagagcaggtgaggtggcctgcatggcaccgcagtaacaggccctggtgccaacagagccccaacagggctggcaggggcccctcccactggcctgatacccctcctgcctctgtgttcccagaggagctgggggtgggcagtgatgggggaagcctcaggctggaagcttcctgggagggggcttgagatctgatagctctggagggacccgcacccaccacctaggctccaagacagaactgggaggtcctgaagcctggccattcacccccaaactccccagcacgtccgccccatgtgagtggtcggcctaggaccctaggatgggggcagatgaggctgtggctgaggccctgcctgcacctgcactcctgggtcagccccacccctcggcccctcctcgcagcctgagtgaaaggctaattcaccacccgcccacacgggccccaccagcgcccctcctcctgccatgcacaatggaacccgtgtccctgaagggctggcgctcaagggggcaggaatctggggtcaagcatccctggactgcagaagagcccctgcccccagcacatggccatgtccaggaccagagagcccgcacccctgccccagtgcccacccctgccccgtgcccacccctgtccctgtgcatagcagccccttgggcaggggaggctggaggccgagggctgtcctggaccctgccaacccctggccggcccccaggcccaggagaaagaggtacatgcacctttggccccacagtgcggcctgtgacgcagccacagggagtccagggctgcacactgcgtctaccccacaggccactcccagccctgtgctgcccccactccagagctgagtcttccggtctccccagatcacacccaacgcccagcacctgggccccggagggaggccaccccatctccccacccagccctcacctgagcgcccaggctgcttggccatgggcaaggagacctccgtgagtggcaggacgtacacgtcgggcccgttctgtgctgccgtggccggggagccctgcgccaggtcggctgcgtactcgtccccctccgcattctcaaactcctgcgggccgggccgggcatgagcggggcttctcgcaggtcaaggaagggtgtggctgggcctggaaaggcccctttcttccagggccgagctcccagggcagggcaggagggggtgctcggcccagagttggagccaccgcccctgcaggccaatggcccagcacccctgctaactgcccttccatctgtctcctcttgctgacccccacgcccccgaccagaggctcagttgttccatgaggggccagaggcagatcccagagccaagaggacccatctcagactccagaaagggcgcgatgagctgtaggcaccagcgcctcagcctggcctcagttcccccatccctccctggcgggcagcccaggctgagccccaccttggggcctgagggtctagaggcagggaaccaagggacagaggtgagggcactcaggccagctggccctgcccatccagaatcagcccccagcacctctcagccacccacatcccgagcagcccctcaccccgggctgtgcctggggtcccaccctcccatggcgcagcttcggggacaggaattccatcaccccctgccccacagtcctgtgggagaagcaattaagtgcccccacccctgccgggacaaggagcattcctggatgtctgggagcccagagccaaccggccacctttaccctgggcagcccacctgccaccgccatctgccccagcagccttggaccttcacctggtggccacaccacctccggagctcccagaactccttaagagcctggccccgtgcagcctagggctgggccactccctgccaggctgctattttgaaatgtagaggctgcacctgtataggggataccccacccccaagtccagggcacattcctgcgctgagagccaaagtctccaaagtcctgggcccagctgaaagcaattgctccaggcacacaatgacagccccaatccctgagcacttggtacagcctttctgtccttcctcacaacccccagtgccctggtggggaagctgaggctcagaggagtcaagggacttccagctggatgctggccagcacccgggctggtgagtccgaggacaggcaggtgcagtgggaggggaggcctgggctcctcaagtacgacgtgtgaccctggggacgcctcccttccctgggctgcaaagagaggggcaggtggctctgtcggtattcccgcaggccaggcccagcctgccctttcggagcacacagccactcagggatgggggacgcaggtgctgcgtgggcaacttcccctccccgggacccagaagaccaccccagaagccccctcttgggccctccaatcccagccccggcctggccccacccatctgggctttgtagaggggcccaggacacagatgctgtctctccctggggtcgggcccgggctccaggcattacctgctgcccgggggccagccgggtcctgccgatacagcgtgcaatcaggtagcacagggtcagcattgggggcctgcccagccccttccctcagcacagctccccaccagggagcccagcgcaggtccccaaatcccaggagggagcccagtgtggaggcaggacttcccaggggcacactggtgctggaatgttccgggcaccatgttcccaaggaggtgaggagggcgcaggaggaggagctatggccagcccttgtttggggccttgttcttacagtgccccaaggaggggccacttatacaatagccccactcgtcccacccaggccccacctccactcctgctcccgccaagaccttgaggctctggcctcgggatccccaggaaggcgcctgcgcggcctggcctggcccctggtgccagcgggtcaggggtacatcccagagcagggtgggggctctgggcaggagtgcagaccccacagcctggggccacagctttgccccccaggcacgcagctcctcactggttgatggggcctgtggccacttcagagggctctggaaggttgaatgggctggaaaatgtggcctttagaaaaggcaaaaaggccacatccagcaccgtcacctgccaggccagcgggacaggtgggcagagccagctccttggcccattctgcgtcatgacataccaggggcagggaggactctgggactgtctcccaaatgggggtggcgccagctgagtcatgggtcacttagtaggaaggcaccctgagatacagacagggtgctgtgcgcgctgcagaatgcctcctcccaccctcctccctccctgacttctcctggcgtaggaatctgacctctggcccaggggtggggctgacccccgtgggcgtgtgaaccaccagaggtccaggccagggtgtcatttgctcatcagcaggaatgggacccatggagactctgggagggggaggcgatgctggccggggttccttctgcctggccctccctgctgctcagagttacagctggaggtgggctgggggtttgcagggggaggagcagtgcttggcacctgtccttggccaggggccttggcctccagaggggcagcctagtgaggccaggcctcacccttggcggggctccctaaccagcaggctgggctctagcatcacacatcgtcccctccagaaggcagaagataccccgcgcaaggtgactccaactggcaagaaggtccctgtgccgggaagcttgtctgggcagcccggactcccctttgcagattgaattcggagggacgtgagagccccttgcagaggcagctcctccaccaggagtcgggcctctagggaggcaagccccctcccacaccagctccagagcccccgacgccccctgcaaggctgtcctcagcctccgtgagtgctcgggcccaaccccaggctggagtgggagcgtcagaccacgccccccacagagggcctcaaagtcgaggaagctggggcaggtccctgaggaggagctatggagtccctgggccagggtccacgtggtccccaggtggccccacagcaactacggccacccagcagccaccttgatggccccaggaaggagggaagctcagggtcaagtggacgctacaggccttgcctgcgggatcccacgacagctcccgcggcccccaggcctcaccttgaacccgataccgcccttcttacagcacaggcaggccagcatgaggacgatgacggcgaagagcccggagaaagacacagccaccacggcgagggaggatggccaggacagctcgctgagcggggcgccgtctgcgggagagcagtgtggtgagagtggccatggctgagggccggccaggcccctgcccctgctctgggctccacagccccacctggacttgctgcattccaggctgggcctcagcaccctgacctctcaccccagaccccacacctcacagtgtggcgaggaggtggccagagcctgcagtcctgcagccagccactggacaccaccctggcttcgccagggggacatagggttggcagagtgaccagagcctgcccagttcccaattctggggttcagatacccctgagaggtcagggtctcaggggctacagggggacccccatctccctcccagatcccagtcaccccaccttgcccctctggggctgggaagggaacatggactctgtcaaacacgggagaccatgttgctggctgctatctgctggccacacaccaggctctggacagcgggggctcaaggcccttccagcctctgaggtgcggggacctcactgtccctgagaaggtggtgctgcctctgccaggcagcagggctcccgtgtgccacctgctgcctcgaatccgtccccttgccaaacccactgccaggcccctctggtgctgcttctgtcctgggaaccatggggaaaccccgttctgcagctgctggtccatggagcccctcatcccagaggggaactgacagtacagcatccctcccaacttcggagtattgagctgagcccggcttccaaatcaggacacctgagctgagccaggctttgaggaagctcggtccatctgctgcccacaggatggcatggtgggggccagccttggtgtcccctgggcaggggagggcacactgacccgctggctctatcccctgggcctgccccgtcccaccgcacccagctccaatccatgcccttccctaggagctttctgtccggctgccctccacttggccctggagattttccggccacccccagtgccttttgccactgagcacctgcaacttctcagctcccaacacccctcaacaccccatctcctggcccagcacacccccaaaggtgttgtcatctctaccccactggacgagccaagaaacagggtcagtgtgggcagggctgcccgaggtggcacagctgacctcacctggcatgctctgccagggctgcaggctaatggggcatctgggaaggctgcctggaggtggcgtgagctagaagacagtgagggcagcctaggcttcctgctcaggtctccaggttgttccccacacacgaggaagagggaaccaggacggcttggagtgaggaccagacagggccgtggggacaaggaggcagggggcggccagcaaagcaagacctgggtcaccggggaaggaaaccagctctgccgcatgtggagacgagccaacgggtagggccgtgaacagatgtcatcccaggcgaggtttccaggatgtgcgggcgtgcgtgtcatgcgtgtaaggacaccctgcacaccgggtaagccccgctgtgttctcatacccgaacggcaggaacacaggcaggggctcacgaggcactcaacaggccccgccctccaaagcagccagcgctcttcggaactgcaagttgccatggtgcccatctcccaggctccatctggtgcccgcctggcatcagtccacacccctctaacaccttcgcccatgccctcctggcccctctcctggcgggcccttccctcatgggacacactggatgagtgaaggaacctatctgtggccttttggggccaggatctggcctcctgtcctcagagccagcagagccctggggctggacaggccacctgctgggcaaagagcagccccaggaggcccgacctcagcctccccctcaacctccccttcggaaccaacctcggccaccctgggctcccctcccatggccccatcccttccctggtcctcccccgaatggaggcagctggcctcagccttcccacctccaggaccccacctcagctaccctgggctccccccagcaggacgccatcccatgcctggtccttccccgcactgaggcagctggccctggggcacagccctgctgtgagttccccctcccctctagaaggcccaggtcccagtgctgggcggccatggggggtcattcagcaccacgtgctgactcagtggagggcagaggtgggcaggggcaccaggcaggcctgcccatgagcacaaggttgtgtccctgaaggtggatgtgtaggggtgggggactgtccacacaagccagccagagccagagggttgcaaggagagacggcacacctaggctttcaaatccacagaagcggtcagtttctggagcccctaccagtgcccagagcagcagaaaccacagcggttcccatctgagggtcagagcggctgtccgaagctccagagaccctccctcatcagaatcactaccacccttgccgggcgcggtggctcatgcctgtaatctcagcactttgggaggccaaggcaggtggatcacttgaggtcaggagttcgagaccagcctggccaacacagcgaaaccccatctctactaaaaataaaaaaattagctgggtgtggtggcacaagcctgtaatccaagccacacaggaggctgacacaggagaattgctcgaacccaggaggcggaggctgcagtgagccgagattgcaccattgcactccagcctgggtgacagagtaagactccgccttaaaaaaaaaaaaaaaaggaattactaccaccccactttgcagatgaggacactgggtcccgtggaagcgaggtggtttgtccaggacaccagtgcgcccagccctgtcctcgtggccacgagaggaccctgggcagaggagggggggttcccacagtctctcggccgcaggctgatgcctccctcaggcccacctgctctcggccaccctggcacccacagccgagtgcacccaccgccgcctctgcattcctggagccttctctgtgccctcatcagaggcacctgctacctgggccccgctggctgtcagcttgtaagacagaccaggctctgaccccagatgccaagggccaggactagtgccctgggaaccatgacacttgttgtaacaatccagcacacaaatgcccacgtatgtgcatgcatgaaaacacatgaaacacacatgcacacacacctcatgacaacgcgaaacatacatgcacacgtagcatgcatacaaccatacgtgtgaccatgtgcacacactatacacaggccaagacatgaacgttcatgcacagacatgcacacacacatatgcatgtgtatatatcacacgtgtgcacacccatacccgcacaggcatatacccacgtgcacatacacacgggcacacgtgcacacagccacacgcacacatccacacgcacgcacacatccacacacacgcagacacccacacgcgtgcacacacccccacacacgtacacgcacccacatgcacgcaaacccacacccacgtgcacacagacccacacccgtgcacccggacccacacctgtgtgcacacacgcggacacatacgtgtgcacacagacataccccacacacacatgcacacatacgcgcacgcccacatgcacacacacacttacccacacatgcgtgcacacacacacacacccccacatgcacacatatccacccacacgcacatacccacacacatgcacagagacatacccacatgcacgtgcacacccacccacacatgtgcacacatatccacacacgtgcacacatacccacacatgcacacccacacatacccacgcacacacactcccatggacacacgggcacacgtgcacacacacccccacacgtgcgtgcacatacccatacacatgcaaacacacccacagatgcatgtgcacacacacccacccacatgcacacatgcatgcacacacaccctcgtgcagacacaatgcacccacacacgtgcacatacacgttcgcgtgcacacacgtgcacacatacccccacacgcacatacccacacacgtgcacacccacacgcacaacacacacacatacccacacacatatccacacatccacacatacccacacacatatccatacatgcacacccacccacacacacccaagcacgcagatacccacacgcgcaaacccacacatgcgcgcacacagataccaacacgcgcatgcacacccacatgcacgcacacacccatgtgcacacaatacccacttgcgcgtgcacacccacgtgagcgcacacacacccccacgcgtgcagataacacgcacacatgtgcacacatacccatacacgcacacacatataaccacacatgcgtagacagataccacacgtgtaggcacacacacatgcacaccccccacacgtgcgcgcgcacccacacccacacgtgcgtacacacgcatgcacgcaccccacacacccacacgtgtgcacacccacaggcacacacacccgcacatgcaaacatgcacacacatgaatgcacacatgtgcacacacatcccctggctcagtccccactactggcctgctcagtaggtatcatcatcctcactttacaagtacgaaaactgaggctcagtgatgtcacaagcacacccaaagggtggcctggctctgccagctccactgccctgctccagatgccatgcctgcccctccacaagccacgtgggaggccccacttatctccttgggaccagcccccactagcaggtggggaggcctctgtagggtctgcttgcctgtccctctcattaatgccgcactcttcccaaatacgagaaggggtacctgggacctcagcccagaaacccgtgcccaggaagacacaagttgcacacggctttgtttctgaaacttcttgaaagcccatttaaaccagcatcccactgttcaaccctctgctaccacacaagctgcatggtgtcccccaggctcttccaagcccggccctctgctgccacacatgctgcgcggcccccaggctcttccaagcctggcctggccataccgcggtccctggtcctcccgcaggccttatgagagcccaagtagctgcactgaaaggtcacttcaaagcacaccctccaaccctggtgacccctgctgatgccccagccctccactgcgctgctgaggctgtgcccctggccatggtgagaatgggggcagttctgcctcctctgcaactgggctggagggtgcctatgtgagcctgcagtggatacaccgtgacaccagcatgcacacacgtgtccaggctgtggcttcttaggccactgtccacacaaggaaccagggcctcacccatggtgggtaaaatgcaccaggactgtcacagcccatgagtcctctgtccaccagccttgtccactggccctgaatcagccaccctcaggacccccaaaggatgactctatttctttttgttttagagatggggtctgtgttgtccagatgggaatgcagtggggtgatcacagctcactgcagcctggaactcctggcctcaagcagtcctccccgcccagcctcccgggtagctgggatgatgggtgtgacaggcacgtgccaccgggcctggctggtgactgtttctactgttcctgctgcgtctcctggtgtgcactctgccgtgagggaaggcagggccttcacccccacttgcttttttcgtatcagtgctcaagacactatcattcccatttatttacgtcacacttaggcactccttttcattccaatgagctgtaatgtgttactgtaattgtttagtttgattctcaaattgccccagatttggtaagggggcacctggtgtatgcagaacaacggctcccagagctgtccacctcccgatcctcgaaacttgagactctgggtgccttgcatggcaaaaggagctttgcaggcgggatttaggtaaggacgtgaggcggggccattagcccggattgccaggcaagccagggtcatcccgagggtctttggatgagggaggcaggaactggagatgagagaagtgactgcagaatcagagaccgtggggccgggggaccgtggggccgtggggaccatggggccgtggggccgttgagctgtggggcggtgagaccgtggggctgtgagccgtggggccgggagaccgtggggccgtgagccgtggggctgtggggcggtgagaccgtggggccgtgagaccgtggggctgtgagccgtggggccgggagaccgtggggccgtgagccgtggggctgtggggccgtgagccgtggggccgtggggaccgtgagctgtgagccgtggggccgtggggccgtgggaccgtgggaccatggggccgtgagccgtggggaccgtgagccgtggggccgtggggactgtgaactgtggggccgtaagccgtggggcccatgagccgtggggaccgtggggaccatggggaccgtgagccgtggggccgtgggggctaggagccgtggatgcaaggggctggaaaggccaggggtggactctccccagagcccagcctccaccacattgactatagcccatgaaagtgactttcggccgggcgcggtggctcacacctgtaatcccaccacttgggaggccaagatggatggaccacctgaggttaggagttcaagaccagcctggccaacgtggtgaaatcccgtctctactaaaaatacaaaaaactagccgggcatggtggcgtgtgcctgtaatcccagctacctgggaggctgaggcaggagaattgctggaacccaggagacggaggttgcggtgagctgagattgagccactgcactccagtctgggcgacagagactctgtcccccccaaaagaaaagaaagtaagtgactttcaatttctgacttccagaacctacgataatagactccatgaaatctgtaatcagtggccacaggaaactcatgcaacagcccttccaaggggctccccagcaaagcctctgtggtgtctgcccccaacccctgtgcctcctgggacacaagacaggcccagcaagggtgggggtgccatggaaagcttggtggctgggcaggtccccagagggccgccatcagtcctcaaagacatgctcagatgcagtggctcaggcctggcaccagctggtcccaaggtggggtggtgagggtacatctgctgtgcacacgtggctggacgcgctgggggcaggtccaggtcagcttcaaggactctgcccaggctaaccctagaggcctctagtgccagcagttacttactttttttctttctttcttttttctctctctttctccctctccttccttccttccttccttccttccttccttcctttccttccttccttccttccttgatagagtctcactctgtcacccaggctagagtgcagtggcatgatctcagctcactgcaacctccacctccccagttcaagtgattctcccacctcagccccccaagtagctgggattacaggcacctgccaccatcaccctcggctaatttttgtatttttagtagaaatggggtttcactatgttagccaggctggtctcaaactcctgacttcaggtgatccacccaccttggcctcccaaaatgctgggattacaggcatgagctaccaggcccgctcttttttttcttttttcttttctttttttttttgagacagaatcttgctctgtcacccaggctggagcgcagtggtgcaatcacggctcatggcagcctcaaactcctgggctcaaataatcctcccaccttagcctcccaagtagctgagaccacagccttgcaccaccacacccgctaatttttacatttttttgtagagacaggtctcactatgttgtccaggctggtctcaaactcctgggttcaatcaatcctcccgccttggcctccagtttcaaagttaatgtctatttggccattgtccagctctggagcattggctctgctgagaggttggggtgggaagaggcagagccagccacagggagctggcaggggaccaagagcagggaagagaaggaggtgcttggggtggagacacccccacaacaggctgccggctttgagtcagtcccaccctcctgggagtggcttctcacctgtgagcctccctgagcagtaaggacccagccccacccccgccccagccagccagcctccctgtccccgtcccccaaagtccacttgacttgtaaccaccctatccacggaggtgtggacgcatcatcggcgtgaccctcacgcccaccaggtggcactctcagccattttacacacgcagtggaaaggacaggaggctcctgggactctgggccacacacagaggaacagggaggccagctccaggcacagcgtggcctgagctcaaaacacaggcgtggtccaggatggcgcctactcagcacagagctgggggatcccagcttggggtgctgccgtccgcagcgttgccggcacacggccttccctcgaaggccacgggagagttccgagagtggcctggctgagcctgagagtggccccacagcccaagcccttggccacacctggctcgatgagcccccacccccgcaacgtgcacacgtcccaggcggaagccgcctgcagcagccccaggtcccaggcagcctgtgcgggaccctggagtcccaggacacgtcacctgacctggcccagcttctacagggctgtccctaggaccgggtgctcactgcagcacagggtggccctggtcaaagccaagagctagtaagttttctgtgttgggtccaaatgcacttcccctcaaccccatccagctctgcctggggccatgcagcccccaccccttgtgtccacgcagcccctgcctcccgtgtccacgcagcctcacttcccccagccatgcagcccccaccccccgtgtccacgcagccccaattcccccagccatgcagccccgcctcccgtggccacacctggtcctccagcctcctcgacccctctggcttcacagcctctctcctcagcacgtcgccccacagttagcaatccccacccctgatgaggccaggactgtgtggagtccaggggccccacggtgggtggccatggggtgtgatccccacggggtaaggcgaggcctccactctctccacccacactgcctcttctggaaccttgggccctgcctgcccggggctccaggctctgctcacccgtcgggtgtgcctggcatgcatgccccgtgggtgcgggcgtgacccccacatgctagctcagtctgaggttccaaggctcccagccattccccccacaacagcaggtgcacccagggtgagcacggtgcccagggttgcccctgcatgcttcctccacccaagctgccttcctgcagggacgggtggccagggtggccagcacataaggtgtggctctctgcccccacccctgtccccgctcggcccttcaggaagcttcctgctaagtggctaagtgcacccctccaggaacttggggctcactcccctccccgaggcagcctctttcaccttttgtggcaccaacagccagcgtctcttgcacagacccagcctggcccacacctcccaaaaatgcccccaaaatgtccccaaatcacacaaacaaatggatcaggatcagcaaagctgcagataggagcctgggggtaaaggtcaaggccccttgtcccagccccacactgccctccccatcgctctgtgctggtcgggtgttcacacctggggcaaggtagccaggaccctggggagagggtggccacatcatcagggaagagcaggcctgtgggtggccgagaggacacagtggcccctggaggcacccccaggcggggccgctgcagctgggacaatggaggggcaagggggccgggcagggggcccgcaggagcccacagggctcccttgagagccgcccacccactctcagtgccgcacccccggccattcacatttccagcgtgggaggagttcgccttcactgttactaaagcttctgtcttcatcaaatccacaccggagagtgtggcagagtctgagagcccagctcgctcctgtgaatcacaagctacgaagtccagcgtgctggtgcccattaaagacactgccttagatgaagctcccgggtgaaagaagctaacagcgtggaaaaagaaagcacagacaggaaatctgcccttccagcgtcaaaagctacaataattagaacctcacagtgctggggcacaaacccaccaaaatctgggcctggccacgcagaggattccacactccatgaaaagcctgacttcaggccgggcgcggtggctcacgcctgtaatcccaacactttgggaggccgaggtgagtggatcacttgaggtcaggagttcgagaccatcctggccaacatggtgaaactccgcctctactaaaaacacacaaattagccaggtgtggtggcaggtgcctgtaatcccagctactcaggaggctgaggcgggaaaatcgcttgaactcccaaggtggaaaatgcagtgagtcaagattgtgccactgtactcctgcctgggctatcgatagagtgagactccatcaaaaaaaaaaaaaaaagaaaaagaaaaagaaaaaagaaaaaaatagcctgactgcataacttcagattaaatgattctaagatagattacagcatcttaaaagaaaataggtaaatattagatttctgaatggagaaggatttgtaagctaaaagcaatggaagggatcgcaaaagaaaatattgaaggctttggctccgtaaaaatgtctgttccggctgggcacagtggctcacgcctgtaatcccagcactttgggaggctgaggtgggcagatcacctgaggtcaggactttgaggccagcctgaccaatatgatgaaaccccgtctctactaaaaatacacaaattagccaggcgtggtggcatgcttctgtaatcctagctactcgggaggctgagacaggagaattgcttgaacctgggaggcggaggttgcagtgagcggaaatcgtgccattgcactccagccttggcaacgagagcaaaactccatctcaaaaaaaaaaaaaaaaaaaaagggtgttcgataaaagccctcaaattaaaggcacacagcgaaccgaaaaaagcaatttacagaaaatatgtcgaagagctgatgtcatgactacacagagcacacaatcagtaaaaaataacaaatacgttaagaccccaaacataaacaagactgagcgcggtggctcacacccacaatcccagcactttgggaggccgaggcaggcggatcactcgaggtgaggagttcgagaccagcctgggcaacatggccaaatctcttctctacaaaaaaatacaaaaattggccgggcgtggtggcggacacctgtaatcccagctacttgggaggctgaggcaggagaatgacttgaactcaggaggtggaggttgcagtgagccaagatcacaccattgtactccagcctaggcaagagagcgagactccatattaaaaaaaaaaaaaaaagaaaaaattagctgggcgtggtgatgcacacctgtggtcccagctactcaggaggccgaggtgggaggatcacttgagcccaggaggcggaggttgcagtgagccaagattgagccactggaccgcagcctgggtgacagagagagaccctgtcccaaaaacaaaaaccacaaacaagcaaactacgtgaagtcagctcacaaatgaggaaatacaaattgcccaacccggcagggcacggtggctcacacctataatcccagcactttgggaggccgaggtgggtggatcacttgaggtcaggagtttgagaccagcctggccaacatggcgaaaccttgtctctactaaaaatacaaaaattagccgggcatggtggcaggtgcctgtagtcccagctactcgggaggctgaggcaggagaatggcttgaacccaagaggtagaggttgtagtgagccgcccagatcgcaccactgcactccagcctggatgacagagcaagacgctgtctcaaaacaaataacaacaaaaaaccaaactgcccaatccgtgagaaaatgttcagccttgatcataaagaaatgcaaaattataacatgtccagtttccagacagcgggagtttgtagaagccagtaaatcagaaccggctgcccaggccgtttggtggatgttaaatcagaacagcctgtggacctgccttctctccagccaagtaattccatgtctggaaatttacactaagaaaataacctagagggcacacgcatccagaataaaaataaagtaaggaatgagaaagtgaacgccgcagacggaaaaagctatttgcacaaagatgttcattgcagtggtatttataagagcaaaaaagaggccaggcctggtggctcccgcctgtaatctcagcactctgggaggccgaggcagacagatcacgaagtcgggagatcgagaccatcctggctaacacggtgaaaccttgtctctactaaaaatacaaaaattagccaggcgtggtggcaggtacctgtagtcccagctactcgggaggctgaggcaggagaatcgcttgaacccggaaggcagaggttgcagtgagctgagatctcaccactgcactccagcctgggtgacagagcgagactccatctcaaaaaaaaaaaaaaaaagtaaaaaagagcctaaatgttcaacagtgaaagaatgatgaaataaaaacaatggtatatctgcaaaataagccataaaaagtgaatttaagactatgttttaggcctggtaaggtggctaacatctgtaatcccaggatgccaagactggcggattgcttgaacttaagagtttgagactagcctggccagcatggcgaaaccccatttaaaaaataaataaataaaattagccaggcatagtggcacacacctgtggtcccagctactccggaggctgaggtcggaggatcgcttaagcccaggtgtggaggttgcagtgagctgaggtcatgccactgcactcgagcctgggtgatggagcaagaccctgtctcaaagaaaagaaggtgttttaaacaaacgggaagatatcaatgacgttatgctaaggaaaagaagcaggacgtgcaggactcccaggaccagggcatgagggaaacgtgtcatcgtgactgtagggcctggtgtatagacagatgtgcatatacatatttgatgagctttgacgtctcatatacagatgttagaattagtgaaattacacacggtcaccatgcgccgtttggttctcttccttctaccctcagtaagggtagaaacaagcaggacatataactatttacaaatcctgatcacaactttgtcaaaaaaaaaaaaaaaaaaaaaaaaagaacagaagaaagctgggaaaaaataccccaaagcgtgaagagtttgtcttgggaggtagaaatccagctggttgcatcctgtacttgcacgttttctacaacaagcatgcactgcatttagaatcagacgatgtatgattgtatttgattatcactcaaacctgatcccatcactgctgcccttacagagccgcgctggacgcagaatggccacctgccctggggtctccgtccactctctgctgcccccaccacgctcagcctcccacttgctcctccaccctgacatgctgtcccaacacccccggcatcttgcaaagcgcctgatgtggtccttggaggagcccacccccgtccacagggacccttcctgctcaagaccacagcccaggccagctcacagggaacgtccgctggaccagtaccagcctctagaacgaccggctggacttgaagccacacatggctccgggatgaggtacctggggatgagccccgggggttcccccaatggaaggcactggatacagtgtgggaggggacaccaacgccctgaggtgcctgcggcacacctggggcaagggagggaaggagcatacagacacacgggcacacacttgcacacacacacacacgtgctctcagacacatgcacacacacaaatgcacacgctcccactcacgctcactcatggagattcgcatatgcacacactcacgcgcacactcacgcacacacccttgcctgtgtccacagtcctgctctgagccagcggggcctacccgagtgtccaaggagcagatgaccctgctagtgaggagcttgggaatagcccccagttgggcagttggcgaggtgtccccaggtgagggagacacggagaccgggggtggaggtgccttggccaggccagtgatggggcagcgacccaggctctgtcctgggagcaccctggccgagctctgggttgaatgcgtcccatgactggtgagcaaaagggatggccatcccgagagctgcattccggggccggggcagccccgccagcctcctccagcttctgggcaccccctccattgtccgcagcccacccatcccgggctggaccctcctcccctgagctggtgcaggttcccttccctgaccccagcacatcacccaccaccacagcctccagccccgtcaccaggcccagtggccaccgcccacacccaacacctccatcggactgccctggagtttcccaaccacacacagctgaggctagttccccatgcggtcctgcctcctgccctccccggcctgtgggaaacctaaccccttcccccaccctcacaccccagccccctgaggaaacccaacctccaatcccttgtcttctctccacatcctccagcccctcacaggcctccaacctccaccccaaggcactagcccaggaggaccctgctcacgcctccccggggatctgcagcgtcacccaccatggccattcctgacctagatcacagccacttctaaaagcactgcccgcggcacccccagcccaccctgggcttggctcccatggccgtgggctcacaacagccctgggtgcctggagcctgtgcccccatgagctctgccccctgctcacgcctgtccgggctctctgcttgtccagggtttcttcggaggcagggcccaaggcacagggtactcaggaacccccgctgcaacggcagtcagcccccatcagcccagcctcaaaatgcccggtgcctcagtttccccagtctacctggaggggcatgtccctctggtccgacagctcaagcccctgaggaaggtgagcagctgacccatgaggagggccatgatttttttaatgggaaataacaagtgagtcctcatgctgccgtgggaccactgcggaccagcctggtgcctctggcggggacagcacacagctctgtggatactcggtgtccagacaggcaaatccagacacagaaagtgcgtgggtggctgaggggagggggatggggagggaccactgatgggtgcggggcttccttctgggctgatgagaatgttctggaactagaagcagtggtggtttccacaccttggtgaatgttctacaagcccctgagctgtttgctgtaagatggttattttgtgttatgtgaattatacctcaatacatttttttaagtgaacagtttgacatccctctgtcaacgctgggtggggacaggcgccccactcccacattctagtgctcccccccaatcctaggactcccccatcctagtgctcccaccccatcctagggctccccctgatcccaatgcttcccccatcctactcctcagtacccccggcagctcactgcccattcccccagacctccttcgtgctctgccaccagggatgccccctctgggaagccgcccagatcctcccagaacagggactgtctccacaacaggctgtcctggggaactcccctatcacagccagaaccctccactgctcacaccatgaagagctcattcctcatccaatgtctctggggacctgaggctccccctggcactgccacgtggaaaggtgcggcacaaggggtgctcagcaggctggaagcgggctctggcccctaaggcagacagacaggggcctctctgcctgggtggccagcaggtgggcctcggcagggcatctgtggacctcctggcaccagggtcccctttcccccgtctggtgatgcaaacaggatcccgtgcaggaaggaactggcgcaaccctggcaggcgtgccgctgagtcaagggcagacggtactgggggagtcagcatgtccaggggtcaggccagtgtccctgggaagcccagagtggtccccattgtctgttacgaatacccctacctctcagttgcaggctgaagtagtaagattcttggggttcctgggacaggagaagggaggaaggggtactctgtgcccccctacgaaccactgtgaggcagacagaactttgtgggctggggaacaggatttccctgcaaaggtttgcacaggcgcccagacacagaacattctgaggaacggaattcctaagcagagacacagagtcacttttccaggtggagacacggaagccgggtgtcagccaagccccacctgcacagaacccaggcccagccccacctgtctcccccaccgacccctcctgtctcccccctcacccctcctcccccacatcccccagaaatgaaaggacagaccctgtgcctgggatcaagcattaacttttctatgacgcaaggctcctggggctggggggaccgtggccggggacgcgtgcacacacttgtggctcagacgcatccgaggggcagcaggccacctgacgccaggcccccacgcgacccagttcttcagaggcccggcctcccccatctggctggtcacttgggcccatctgcccccagcctcccaggacaaaggctgtgtccaaaggacaccctgaccccaagagctggaactgccctgggagtgattaaggaggggcttggatcataatcccaaaagacaccgtctcaacaccatcatccagaatatgctgaaatccctgaaatctaaaatccccaaaatcacagtcaccagagggttgcatcgtgttaggcagagctgggaccctgaggttgtctttatttggaaattaagtgtgctcaagggagatgcacatggtggccaggctgacaagggtggccttcgatttgggtgtcaacttaatcatagaagaagtgaaaacacaggcaaaaaatacaaatctccccaccaaattattcaatcacgtgagacttccaacccctcacaggcagtgccacgcttgccttcaaaaaaacagcctttggggcgggcacagtggctcccgcctgtcatcccagcactttgggaggctgaggtgggcggatcacttgaggtcggaagttcgagaccagcctggccaacatggtgaaaccccatctctactaaaaatacaaaaaatattagcagggcgtggtggcacttgcctgtaatcccagctacttgggagactgaggcagaagaatcgtttgaacccaggaggcagagattgcagggagccaagattgtgccaccgtactccaacctgagaagaaagcatgactcagtctcaaaaaaaataaaaataaaaaatcctttggccgggagtggtggctcacacctgtaatcccagagctttgggaggttgagacaggaggatcacttgagcccaggagtttgtcacccacctggacaacataatgagaccccgtccctacaaaaatttaagaatcatccagcagtgtgactcgaacctgtggtcccagcttgttgggaggctgaggcgggaggatcgcttaagcccaggaggtcaaggctgcagtgagccaccattgcaccagtgcactccagcttgggccacagagcaaaaccctgtctcaagaaaacaacaaaccacaacaaaagtcctttgtcagagaagaagaagaattcaaccaggtcagcaacctcagaaacagacgcttgctgacaccaatactccttcctgttacaaagcacactcggcggtgagctgagctatccttggggatctgatcaccagagaagatggattctaatatttagtattaaatctaacagaaaaccagtgcatgcttcactttgcctaatggatggcaccttcaaaaccagccctgctgaattttttttttttttttgagaccaagtctcgctctgtcacccaggatggaatgcaatggtgtgatctcggttcactgaaacctctgcctcccaggttcacatgattctctcgcctcagtctcccgagtagcaaggattacaagcgtccaccaccacgctcagctaatatttgtatttttgtagagacagggtttcaccatgttggccaggctggtcttgaactcccgacctcaggtgatccgcctgcctcggcctcccaaagtgctgggattataggcatgagccaccgcacctggcctccatccccactgatttttatcagctatatacaattcatgcccctgttggattaggaaattccagagctttcctggcttgtttctgtattaacaactgggaaaagtacagcaccttatcaacatttatttgaagatgtggtggactttgtggaagaaaatggatttcaatagagtccccaaaccatgacagatttggaattaggtgtgatcaaggcttctaacagtcaatttgaagatgtcaccaataaagtttgtcttttctgttcagcccaacacactgggcggaaaattcagatgagacaggaacttccgtttaaagatgcgtcatttgcctgcgtgggtgttcctcccagctgatgacaccccggagcgttcagggaattaacagctgcatttgccctaagaagccggggaagttactgactggctcgaaaatactcgtgcgtatggcaggatgagaggatgctttgtgatggtgttgttgctccgtcaccagcactatttccgccaaatctgcggtctgtgtatgaggcccatgcgcaatggacctcccgtaccccaaacaacacagaagcgtggcacagaagacaggagaatctaataggaatgctcatgcagtacgggctgaatcacagaagaatttcaaaaagagcagtgacagctcacgcctgtaatcccagcactttgggaggctgaggcaggtggaccacctgaggtcaggagttcgagaccatcctggccaacatggtgaaaccccgtctccactaaaaatacaaaaattaacccagcgtggtggcgggcacctgtaataccagctactcaggaggctgaggcaggagaattgcttgaacctgggaggcggaggctgcagtgagccgagctgagatcacatcactgcactccagcctgggcaacaagagtgaaactccatctcaaaaaacaaaacaaaacaaaacagagcagtgccatgtagaagatgaatgtgagcgtcttctccaaggagagccacagcctacgagaaaaaaagcagctactcgtcgaaacgcacagcctcaccatgtggtagtgagaggcagccagctcttagggactgtctctgtgcaactgcccgtcacctggccctgccatataccctttttcataaatccaattttcttttttcttagttttttctttctttttttttttttttttttgagatggagtcttgctctgtcacccaggctggagcacagtggcacaatttcagctcactgcaacctccgcctcccgggttcaagcaattctcctgccttagcctcccaggtaactgggattacaggcgcccaccaccatgccctgctaatttttggattttagtagagatgggtttcaccatattggccagggtggtctcaaactcctgagctcaggtgatccacccaccttggcctcccaaagtgctggaattacaggcgtgaaccaccacacccagcctttcctactattttatttacttattttttgagtcagagtctcgctctgtcgcccaggctggagtgcaatggcacaatctcggctcactgcaacctccacctcccaggttcaagcaattctcctgcctcagcctcccaagtagctgggattacagacttgcgccatcacacccggctaatttttgtatttttagtagagacggggtttcaacatgttggccaggctggtctcaaactcctgacctcaggtgatctgcctgcctcggcctcccaaactgctgggatgacaggtgtgagccactgcgctcggccctttcccactattttaaatggtcagcattacttcttacagctcgctgtgctctgtgcttcatctccaaatcatttccagtgctggaggtgtgaactgcgtggagacctttggagggttctcattcatctttgcactttttgcgtgtttgactccacggatgtgcatcaccacggcgctgcgctctgcacggaaaccttgaacttcctcaaaaaatgaagagatgtcctgttcgtacattcgcatttgggcaagataaaatttctcaagaccctggctctgtgggcgactgcacgtgtggcggtgaccatcaaggtttctgacggatcttgtcaagagacttaagtcatcgtcacagtatttcagacgaacgcagtgatgtggccaggtgcacatgctcacccaccatagtagcacggcttcatatgtctccctttttaatacattttacctattattattattattattattttttgagacgcagtctcactctgtcgcccaagttggagtgcagtgcgtgatcttggctcactgcaacctccgcctcccggattcaagtgattctcctgcctcagcctcccgagcagctggattacagatgcccgccaccatgcctggctaatttttgtatttttagtacagacagggtttcaccatcttggccaggctggtctcgaactcctgaccttgtgatccatccacctcggcctcccaaagtgctgggattgcaggcatgagccagcgcgcccgacctataatatttctttttttttttaataaggtctcactctgtcacccaggctggagtgcagcggtgccatcacagctcactgcagcctcgaactcctgggctcaagcagtcatctcacttcagccttcccagtagctggggctacaggtgtgtaccaccatgcctggctaattttttattttttgtagagatgcggtctcgtgttgcccaagctggccttgaactcctgggctcaagcaatcctcttgcctcggcctcccaaagtgctgggattacaggtgtgagctccccatttatttatgagcacagttcatctgctcataactgtatgtaacctgagcagcctgagggtttccgcaacaatgtatgttaccatgttataatgtatgttactatgttacaatgtatgttacaatgtatgttacaatgtatgttactatgttacaatgtatgttactatgttacaatgtatgttatcatgttacaatgtatgttactgttacaatgtatgttatcatgttacaatgtatgttaccatgttacaatgtatgttactatgttacaatgtatgttaccatgttacaatgtatgttactatgttacaatgtatgttactatggcctgtgttattgtgtgaagtggcctctgaagtttttatttttattgagtttttatgtttttcaaataaatcccttttcaaatgcaaataaatgttttttgttttgttttgtttttgagacagagtcttgctctgtcgcccaggctggagtgcagtggtgcttctcggctcactgcaagctccgcctcccgggttcatgccattctcctgcctcagcctcccgaggagctgggactacaggcgccagccaccacacccgcctaattttttgtatttttagtagaaacagggtttcactatgttggccaggctggtctcaaactcctgacctggtgatccgcctgccttggcctcccaaagtgctgggattacaggtgtgagccaccgcgcccagactaaatgtcttctaaagaatcttttaaatcatttttttcctgaattcggtttttggaattttgaccttttgggatttccacactcaggatgatggcacttgggattgtgtcttttgggattcaatcagctcctgctacagagagcccagtccagcagacccctcctcggccctgatcgccagtcaggcacgaaactgaggaccccctccccaactcagaagcagggccctgggcggggtacggcaagaccccacaggcctcccgacacaggggagagagggcaggaggagcctctgggacagcaacggtgcccccacaggccctggtggcggcatcgtgcccagccctgaaccatccccacagtcactcccgagaccagacagatgtgggcaccatctgccgcgtgggattctgggtggcaggtgaggacagggcaggggctgtaagtcacaagacaccgcccccgccaagagaggggagcccgaatgtccacggataaggaggatgcaggccagccacggttatttttaggagaggccacataaaatgtaagcttccgggacaagcccaggacatggcaaggtccacgggcccgggccgggtccatccgacaccgcgggcaccgcaccagcccatgcacacgctcgcctccaacctggggctgcacttgctcatagacgcacacgtacccctccacgcacatgcctgccgcacacgctggcagccccaaggtgggcatccggccctcccccagtgctaggaccagccctactctctgctgcagggaacccccgcacagttcccgggggttaccaccccagcatctctaagtccgcctctcctgcccctcgacagccaaccctgcaatcaaacatgggtgcccagcccaggccagcccagggacggaagtgagttccaccagctggacactcacaaggaatgtcccctctgttgacacaacacacagcccaggcccagcctgcatcagcatcagatgccccagggcctaccccaaggctggtccaagggtgggaagggcacctggaatgcccccggttccccaggaggctgatccctgacagtggagaagcctccaaggggcaggcagctccagctaaggtcccacagcccccatctcttcgctcctggcctgtctctgctcgacgcacactgtcccccaacaccttggccctcggtcccgctcttcgtgggggcctaccctcctgtgcgtctcaggaccccggccctgacacagccgggcatccagctggccccctacagacctgcacggactgagtccctccctcagtgctggctgggcagcagcagggggctgctgggctcaggcttgccaaggaggaaacgggcaggtccatggccagggcggccgggcgtcgcggatgcatgccggccacgggtatttctagacaagacttgcagggccgcccgtcacagaaggaaaaataaaacagtctgacgcgctagttcaggctccagcagcagccaagcatctcgccagaccccgcggcagagagcagggcggggcccagcctccagagccagggtccgagcagggtccgtcctccccgtcattcatccctggggccaggagctgctttcagggacacctgcctctgggccacagagattccaggcagcttcccagggagagaaggtgcctgagcctggcggtgtgctggtcagtgtctgcacccagctccctgggaaggaaagcggggcgtgtgccggctcctgccgcaagtgctctcacctcggcccatttcagggtggaagctgctggtgctcagccctgcacagggtcacgggaagtgaagcagcaggccacctgctcactgcgcacagacctgaggccttgtgtccaggacctgcccactgccccgagcctggctcccacaggccagctggccagggctgcccgacaccaggtacaaaccaccaaaaaatacctccaatgggcactcgcttgaggggctcagaagagctgggcaggacctggaaaggctcctgacatctttcgccacagaaaggcagacaagaccaccatgggcagcccccacatgctcacgagcccgggcgttataaaaacagcagccagcactggcgggaggggaagccatggaggcgttcgtccatggggatgggggcaaaatggcaccacctcctggaagctccctggacagtgccccacagtcacacaccagcacccctgatccctggggccgctatacacacagcgaaaacctcagggcccaaagaggacaaggccacaggaccctgcttatgagacagacgtccaggccaggggcccagagaccgagacagatcggtggctgccagggctgggggcaggggatggggagtgatgccctcgggcatggggcttctgtcaggggcagggatgctccacagctagccgtgccatggctgcactcttgggaatgcaggaaagccccagctgctcatttgacacaggtgggtccttggtatgtgagttacctctcagtaaaggggccctcactccagcgtccacgatagcagcccacgggacagcccacaactgagcatcattcacagagagcgagcgagatccccaacatggggcagctgggagggcgccggcggcctgcgagtgaccggccaggtagcagtcctgggggcagtggcggggactctcgggggctgggcgtgctgccgcgcgggtaaatccaatgcggggaagccccggacccgcaccccggaggtcagagcgcacttgtgtgtgccgtggtcactaggaagccacacgcctttttcgcagggggttcgaggaaattccacgtgggcctcacagcggagcccaaaccctaagcaagccccaccggctgcagaatccgcaggaccaagtaccaagggaacccaaggccccttgttcagagtcactaagaattcccagaagcagagcagaagggaagccagaggggccccaccgagcaccagggcctcgtcggaggatcctcacaccgaggacggcatccccagctccatcccacaacggcctcaagccacagcctcaaaccgtggccttggcacagaggtgactcggcagagccctggtcccggaccagctcccctgccccccagcctggctcccccaggccagctggccagggctacccgataccagggacagggaggggtcttcctggggaccctggcaggtgggtagagccagattcctgtccctcagcagcagggaccccacaccctccccgagggtgagatggggataggctggccacgccccgccgtgagaggtggccttgagcagccctggctcggggtagcatcctgcccctcactccccctggggcaggtggccccggctgcccagaatcgcccactgcagaggccctgcctgctctggcacggccacctccgctggcagggtccctgcaggagcaggagtctcctggccacggcccccacccccaggctggcagtgggagcacagcccgcatcctcccagaaacccccacgtaccaggctctgggtgtcgctcccgcgtggctctgaccgtggctgtaaccccagagtgacccccgggaggaccccagcccgccccagccccacccaaggccgcagccccctgaccccaggccccggtccctgcggagggaggctggagacccggcgaggacgccgcctcccgtgacagttctcagaggtgcctgggaactggctccggccccgtccgctgccctcatttcctctgccggcttcctctgcgggggggcggggaggccaaggccgccggtcccgcgggcgcttgttcctctgtgaaaggcagggcaaggcccaggggggcccagacgccaaagccctcctgtcactgtggcctgcggaggggacgggagtctccccaccacggacacgggctcctgggcccctggatctgtgccaccagggacaggaccgcaggccgaggccccacggcaggtgctttgcatcaggctcccacccaggagtggtcgagtgggcctcccgtcagccttgccctggcgtgcacagaggggtcaggtggccctcgagaaaagcctaccccggaagaaccccgtgagctggagacaggaggccggtgacagcagaacagcgtggtcccaggctcaccgccgacaccacatccgaggagacaccgaggtgctccgtggaccctctgcctcccccgtggaccgaggaggaggcagaggatgccacgcagctgtggccccggcctgcttcctcctcacacccagccaagcgccctggagggttctgaggctgggggctagcacgtggcctcattttcttccaaggataactcttctcaggatggagtcagaggctcctgatgtctcgaggcagctgtgctcacccctcagacccaaggagacccccagatgtgtgtcctgggaccacgggctgctggcccagacggcaaggaatggatgtgctcacagttctggacagtggaggaggaaagcacggcatgggcagggccactccctcgaggcgctggcgggatccttcctgcctctccggcacagcggccccaggtgctcctgggcctgcatcactccagcctctgcacgtggcctccttcccgcgtgcacgccactcctcctctttctatcaggccccagtcattggattcagggcccaccctactccggtccgacctcatcttaacttgattacagctgcaaagaccctagttctaaataaggccccattctgaggtactgggcgggcatgggtttggggtgacatattccactcagcacatgcctccagggggcacaggcaggagcacagttcccaggcggccggggtggtgggtgagtgcagagaggacgtgaacagtcaccagccctggagctgccgtgacggcccccgggttctctcaggaacctcctggagcgtgggtgctgccggaccccatttcagaggtgaaacagacacagagaagttatgagacctgtccatggtcacacagcagggcccggcccaggacaccagcccacgccagaactctcccgtgaggcagggtcagggttgggagccggggaggcagagggcatggcggggagtcgatgcatcccaaacatgcagggtggcacaaggcagaccttccagcatgttccacacaacacaacagctgccagcccaccccagccagctctggggcactcgggcccacagggtggccactgcaggggccggtcctctgggtcactgcaccaccccatggagggaagcgcacagcctggcctcctggagaatgtgccggaatgagagaaatgttctccctgacccatgcctgggagtgtggggcctcacacccaccccctccccgagtgccgacacccacaccctccccgagtgcccgcacccatgctggtaggtgggagccggacccgtgcccagggcccacggcctgcgtgtgaccgctccccaaggccactgtccacacagccttcccatgggaccctctccaagaacccacctcggcctgcacacctgcagcctaagggtctcggtgggagacctgagacctgagaggaagtagggggatgggccgaactcatgggcacagcttcctctggggcatcctctgagaccccgggggcgagaggaggacaggtaactcctcccagggcaggtgcttgctgcctgagcctgagtggtctgggagactgaagcagcagctgccttcaaacagactccacacctggtgcccgggcagtgtcagctgtggggcaccttccaaggggaggactcccggggaccacccaggcccatggcctcctgctcagccccttgagcccctgagtccagccctgcccctgccactgaggccatgcctggcccggggctcgctgcctcctctgccctctccccatcaataggctcatcctgaggcccagcctgcccagccctgtgccaggtgtccggttcacatgaatgctgatagagcgagcaccgtggccaggcacaggcacttctcccaggaaccccccatggcgcctggttcaggtcagacacagggagagaccttgggcaggagacagggcgtgagctgagggacaggggagaggcgggggttggggggtggcaaatccaggctgccacgtgttccgagaacttccacaaactccaagccctgcccactggtcaacagtgacacctctgcgtcagggatcagccatggtaggcactgcccaggtacccacccttggctcagtgcaccactgctgtcccttcagacctggccatcacagccattcccaccttacagatgacaaaacaggcatggagagccagtcacagaagggcccctcagcaaaccagaggtggccccagggcaaacccctgctcctaactgtgcagagcatttgacccccaccctcaggctgagcgcgcctctccagaagccggagcgaggcggtgtccccatgcccacttccagcctaggacagctccaggccccagggctcaggacgactagaaatcatgacgccctgaggccgcaccagggaaggtgaaggctggggagggtgagcaacaaggccagccccctcccttggggcactcaggtagaaggggtgacctctgctcgctcaaggccatgccacccccttcctgccagcctggacccggccatcctgcccatgtgtcacccccatcaccctgcttttcctggccgccatgcccacactagtctccccagagcaagatttcacatgtgcagaacggatctcagagaggctgggtgagtagtccgaggccacacagcacagaggctggaaggctgcagctgccaagaaatcccccagccacgctcccgagtgtcagggagatgggggaagagctgggctccagaggaggcggctcttcctggcactcaagcaggctcctgggccgggtgccccctgccctgcccgcatctgcctggtgcggaaggtcaggggcccaggcagcccacagtctgtgcccacagcctccactctcaggccctgcactatcgggcgtctctgccccctgtaccaccacaactgccgtcacctctatggagactggcaccagttcctgcgatgaacaaggagccggcccggcagcggggcagggcctggcaactgaggtgagacccccatgtcaggtgctagcactgccccagatgctgagtgacacacaagccaactgccagagccacaagcgtgggcccctcccctctgggtgcccccccacagacacaagcagcctcagaaggaaccagctcgctccaattcggggatggcaaggagccagccacatgctgtaggaagcttgggccctgggggtctctgtcccagcaccaccactccagcacagacagccaagtgctcaccaagcactgagcccacccgggcctgccacaggtactgtcggcccatgtcatagatgggaaaaccgaggttcacagaggcaaggccaggcagagggactgcagcacaggacagccaggcttggaaggctgggctaagtttagcgggagggcaggagacccctctctcctccctaaccctctcatgggggctggtgcagagcctagacccagccccttaatccgaaggagggtctccttcctcaccagcaccagcaccttgggcagcccctcctggtaggtgggccccagagcccagcaggtgcctgcagctctggcccagcatcttgcagaggagagacgccccttgcctccaacaacttcttttcctctaagtcattaaacggacacattagaattattcagatcacagctgtttacccagagaagggcagagccggtgctgctcgaaggcgggggaaagggcctctcatggccaaggacaaggctgggccccgaggcagggtatgggccgagggtcctctctgttctgggggcagaaaggaccaagcaccgtgggccacgcctggcatggagatgtgatgaggacctgccccaagcctcctccaccccctgcccttgggccggggagacattacagctgttgccgtggctgttgggctctgagccttcacctgcccaccccacagggacttccgagccccaggggtcactacaggaagtcatttctgagcaagtgacacccacagccctaagcccagcagacagacctcccaccagctcccttcctccagggagcaaatgccttcagaccgagatctgccccggggacccccgtgcctccctgccaggctgcgtgcactgggccctgctccagggaaggagacacaggagatcacgtcacatgcaaacaggctttgtttgggctggctcagcctggtgccagagccccagtgacgtgtgggtgggacttggccctggggccatggatggcacagggcagggggattatctcccactcaggccaagcaggggccggatctggagaagcagaggttttagaaagcccactgcttcctggtgacagatggggcttccagctgtccccagccccctctgcctatcccagctgtccaccacagccaggaggccaggcagccatgggtaatctcgccctgcccggtgcactggccatacggggtaagaggcctggcctcaggtcccctgcagccagcttgacagcgtcacctcgggcccccactgtcaggggatctgggcacccaccaaggcccctctcttctgagcctctgcccactgggctctgtaatgtggactggcccctgctccccccacatcccccgccggctgctggtggctgggcagggctctgagaatcgctcccagcctgggaagaagcctcccacgccagggccccggacccaggagaggccatggaaagcctgaaccccagctggctgacaccccccacacccccaagggcccttagtctgagaccaactctcctggacaccaggggcccacgcaggccctccgtgccccagttacctgtgccctggaggcagccacggagtcacgaccacgcgggggacgccagcccacaggcggaggccggtttgtgctggggcccagggcctgcccctccgagatctggggccgccagggggtccggctgcttctgctgctgggctcggggcggggaaagggttaatttccatgcaaaccgggagccgtggggcccaggggcatcacgtccgcagcggagggaggcagcggcgcgcaggccgggccgccagggactcaccggggtcgaagtgcgagctgaaggcgaagctggggttgaagaaggacgacgacatggccgggccagcggccggcgggcatcccgggagggcgctgcgctcaggacgcccgcggccccggcccgagccgccgcatcacccagcggccgccgcaggtgcggagcgcgccggcccccgcgccccgcgccccccgccgcagccgcagagcccgcaccggtgggggcggcggcgacagacgaggcgctccgcccggccctggcgccgcggggctccgctggtgcagtccgaaaacgcgggcgggagcgcgcgcggagcggcgcgggggaggggggggccctccgcggccggggtggcatggggggagcacggagagggggacacggagggggagacagaggggagcacggagtgggggacacagaagggggcttggaggggggacacggaggggaggcatggaggaggggggacggggggccgtgcacggagcggggatggcacggagtggggggatggtccggagcgggaagcacggcggcctggggctgaggggggcacggaggctggcgggggggggggaaacggaagtcgtgaatggtaagtcgtgagtgggtacggagggaacgccggggtgggggagggggtactcctaggtggaaaggttcagggagacaggtgggggaacccgggagcacacccagggcgggtcttggtgctcaggggccctcgcctcacttgcaggtttcgaggcggctggcagccgcccccccaccccatgccctttgggtggcacctgtgctggtggagtgggggtggctggctttgcacacaggcctgctcctgtaccgtgctgcgacagccatgaaggaagaacctggctgagtctccacctgccgtggactgtaccaggtgcttagggcagcaggttggcctgggcgctgaggggccatcccttcccctatgtttctcccaggatcccccatccccgcccaaagtgccaccttgcagggttggggcggggcagggtccccccagcctgcccccgtgggagtcgggagagttaaagttcagtggaagctggtcccagtggctcatgcctgtaatcccagcactttgggaggccagggcaggcgggtggcttgtgctcaggggttccagaccagcctgggcaacatagcaagacactttctctacaaaaattagaaaaatgagccaggcatggtggcgctcacctgtagtctcagctacttgggaggctgaggtgggaggatcacttgagcctgggagttagaggccgcagtgagccaagatggcaccactgcactccagcccgggtgacaacaagatcttgtctcaaaaaaagtgtcctggagacttgcagttgagtttgatgcaccctcatccactcattcattcactcactcattcattcactcactcattcattcactcactcattctgggaccagatggctaagccccttggcaaggcccagttggggttgggggctgtggagcaggtgagaggcgcccactccaacagggctcttaggactttagggagagaaaggagcctgttcccggcagagggacctgcagagaccaggacaggatgcttgggccacggggcagatgggcaccaggacccacccttcttttcctaagggggtccctcatgtaggaagtttcctcctaacaggcaaagcaaggggcctccaccctgtgccctcagaccttaggggtccctggctgtaggagacaagacaccaactgcacctggggcagaaggagacagggcacccagagccttcttcctggccctgatcatgtggccagccaaggttctaaggggcgctgccgccaggctgccgttgcaggtaaagaagccgcgtgggtagagtggctgaagggggccttgcccgcaggaggcactcagaggccttgggccacctcgttcagtctgtgtcttcagggagcccagagggctgggaggatcagtgcccacccagtggcagggatggttggtgccagcaggctgtgatcctggagtgctccagtgtgagggacagagggtatggcataccctcatgagtctccactctgggtcccctgtcagggcctcccctccccagctcaggagggagtgccctcctctgcccagcctggaaggtgccctagacacctggacctaggcagggggaggtggccagtggccgtgggtggttgctggttggcatgttggggagagtttctgtccagaacttccatgccctcagtgtccctgccttgatgaccagggccagaaacagcttgctgtgaccaggggctggctcctctcagttttgcctgtgaacacacacatgtacacttgtggctgggccacagctcaggggcttcaagctgtggatcttcttggggctccaggaaggacaggggaggagctgcccctgggctccaagccagcactcccaccctacgtaaccagagcgacaccccttctccaggaagcacagggccctctgagatttcgctggaaccaggagttcagatgcttccactgaccgtgaccctagtggggccccccaggtgctggcttttgcccacgctgggacaggatcagtgagcacctctgggtaagaggtccctgaagacatagctgtctgctatcccccggcctgggggaaggcatgatctccgcccctgggactctctagagcccagaaggagctgaccgaggagcccagattggctgggagagtgtcggtgcagaagcattgcccgtcgaagaggaaaaaggccaagaacccagcaggaagcccaggtgtggtggaaaagagggggcaggggcaggagagagcctgggggtctggggattagagaccagagtgaggaacgcacctcaggagcaaagtttagggggcacccaaaaactcagcagttatgcccatccacagataaaccatcaacaggatgtgatctgtccatacgatgcaatggtattggtccatacacaggaccaaagctctgaccacactataacatgcatgacacatgctaccacatggatgacacatgaaaatatgctcagtgaaagacacagaaggccacagagtgtgtgattccacttgtatgaaatgtctggaacagacaaatccacgggacagagcacaggtggagggccagagccgggagaggggcaagtgggggcagtgcagaaggggcacagggcgtcttcctggggggaggaaacttccctgaattagctagaggtgatggctgcccaccctggtgaagatgctaaaacactaagctgtaccctttaaagtggtgaacttcatggcatgtgacttatatctcaataaaattgttaaaaacagtaatcggccgggcgcagtggctcacgcctgtaatcccagcactttgggaggccaaggggggcggaccgcgaggtcaggagttcgagaccagcctggccaacatggtgaagccccgtatctactaaaaatacaaaaattaaccagacatggtggcaggcgcctgtaatcccagctactagggaagctgaggcaggagaattgcttgaaaccagaaggcggaacttgcagtgagccgagatggcgccactgcacatatgtctgtgcatatgtgtagatgtgtgtgtgtgggcggggtcgccccctccagatgctccaggggagggtccttcctgcctcttccggctactggtggccctaggccttcctgggcctgtggctgcgcagccccaacctctgcctgcatcgtcacatagtcgtgtgcgtgtgtgtgtacgtgtctatgtgtgtgtatgcatgtgtgtctgtgcatatgtgtagatgtgtgtgtcttggtatgtatatgtgtgtctgtgtgtgtctgtcttggtaggtatatgtgtgtgtgcatgttcagttgcgtgtgttggtgtgtgcatatgtgcatagaggtaggtgtgtatcggtttgtgtgtgcatgtgtgtctgcatatgtgtaggcacgtgtgtcggtgttggtatgtgtacatgtgtgtgcatgtgtgtgtgttggtgtgtctgcatgtgtatgtgcatatgtgtaggtgtgttggcatgtgtgtgcatgtgtgttggtgtgtatgtgtgtgcatatgtgtaggtgtgtgttggtttgtgtgtctgcatatgtgtaggcatgtgtgtgttggtgtggatgtgtgtgcatatgtggtgtgtgtgcatgtgtaggtgtgtgtgcatgtgtctttgcatatgtgtaggtgtgttggtatgtgtgcatgtatgtgtacacaggtgtgtgtgcatgtctgtgcatatccataggtgtgtctgtgtgtgttggtatatgtgtgtctgtgttggtatgtaggggtgtgtgcatgtgtgtgcatatgtgtaggtgcgtgtgtgtctgtgcgtgtgtgtgtgtccgtcctctcctctcgttatcaggccccagtcattgcattaggaccccctgctccagtctggcctcctcttgatcacagctgcaaggaccctacttccaactgaggtcccaattcacaggtatcagggtcaggacttgaacatattttggggggacacaattcaacccccgatgggagtgcagggcatgggagggaggagggaggcaaagtggggaacatgcagctgtcaggacaaggtcagcaccttcccaaattcttcctgcagatgtctgaatcccaattagccagttataatagcgtttctgcaagtgtagctgccgggactcagcacccaaatctgcctgctgggcaccacagtaggcactgcagagccccaaggatgcccctgcctggctgggcctcaccctgcagtgggcacccccccattctgccacatgcccctccaccatcttggccctcttagaggcatctctagggtgcttgggcccctccagccccagccccagccctgtacccacaggcacccaggaggtaacagagctgggtgctcttccaggctgaggcagcagggccctcaggcaggaggggcagctggtgcctcttagcctccagccctggcctcccccttgccccgcagttgtttcaggcaggaaggtgggcagtgccaaccctgcgggggtcagtgagacctgaacctccccaagggggcagtgcctgtctagtgcggggacaaggggcataatactgtcatccagagctatgaagtggtccttgtggcccttccaggccggcgtagcccatagtcggggccagtgacctgggggcagggctggaggccaggaggggcggctctgaacagaaatgaagccgaaagggccgcccaggggacaggccatctgtcagctcagggcaggtgctggttccgggagctttggagaacactgcatctgccagcccgccctccagcccagagatcccacgccaggctccccaggccttgtggcccaggcgggccaggggcaggtccccagcctgagctgctcacactgcagatgcttccagacgctggtttctttgggtctcgttttattaaaagcatgatttcccactccacatatttccttttttttgagatggagtctcactctgttacctaggctggagtgcagtgacgccatctcggctcactgcaagctccgcctcctgggttaacgccattctcctgcctcagcctcccaagtagctgggactacaggcgcccaccaccacacccggctaatttttttgtagttttagtagagacggggtttcactgtgttagccaggatggtctcgatctcctgacctcgtgatccgcccacctcagcctcccaaagtgctgggattacaggcgtgagccaccgtgcccggccacatatttccttttttattgaaaaaattcacataacataaaatgaatcggcttgaagtgaacaattcagtagcatttgtattcacaacattgcgcccccatctgggtccagaacattctcaccatccccagaggaaaccccaggcccctcagacagcacctgcccgttcccttctcctgagcccccaccactctgtgttcagtccccatggaccggcccattctggacatttcataaaaatggaatcacatggtatgtgggggcgtctgccacgcttccctcagtgggatgttcctcccaaggttcctcctcactctggcctgctggtgccacatgcctttctacagctgagttacgttccattgtgtggacggactgcagtgtgtttatccggccacaccctgaggtcagggctgcttgctggagacagactgcaatgttattagtgttaggtgtggggtgggagcacccgggacaaccccacacagtgggaaagctttagggtgaaccccacacagaagaatatggcaggaccatggactcttccaccttctgacccgctcattccactaacgtgaacatggccaaggaaagggaggggcttcttggacaaaaacactcactgcaacattatatctaatgacaaaagaaccctgaagcttctcctggtccagcagcagacggccagtcaagaaggttgctggggccaggcgtggcagctcatgcctgtaatcccggcactttgggaggccgaggcaggaggatcacttggggtcaggagttcaagaccagcctggcctatatggtgaaaatacaaaaattagccggcgtggtggtgggcacctgtaatcccagctacctgggaggctgaggcaggagaatcgcttgaacccagccgggaggtggaggttgcagtgagccgagaccgcgacactgcactccagcctgggcgacagagcgagactctgtctcaaaacaaaacaaaacaaaacaaaaagttgctggaccgtcctcagctcccaggcacaacacggagtcatctcccatcgtaactgcagagttgtggagacgtggtaagatgtgacaccgagaaagcggatactgcagtcatctcagctctgtgtaagaaccagaggggcagaaacccgcacgaaggaaaacctgtggtttcaggtggagaagcggcggcgtgaggccttcttcactgtcgttattggggtatcaggaaacaaatgcacagtgaagcgtctccttccagacagcccgtggccaggggagctcctcggtgatgtgtacctgttctggtctcaccctggtgacagccctacaaaggccctaccctatgagagatgccggcgaggggagaggtgctcgcagaagccacctgcctcatagagatcccttctccttccagggcccttattttaggagcttcatgagccgggccctggcatggttccctggcccctgcagtgacccatggacagacagctgctcaggcctggccactggaggaagccaggttgtctggtgtcttctgctggcttctcaaacaccctggccaacctgcatgtcctgggagacgctgccaggcccagtgggccacctccatggaccctcgcattctcccctacagcccccatgaagcagcaggtggggtgggagctcatgctacacacagatgccccgagagaaccgactatgtggcttgcccaagctcacagctggaaagccaggcctatatcatatcttgctctataggaaagcactgagaattggacacattccaagaaacacactatctaccaagactaagtcccaaagaaatagaaaatctgaatagatctgtaatgagtaagaagattgaatcagtgatcaaaagtctcccatcaaagaaaggcccaggacctgatagtttcactggcgaatgccaccaaacatttaaagaacaaacaccaattcctctcaaacttttccaaaaaactgaattcagccactcctaactcactctatgaggccagcattaccctgacaccaaagccaaagagactacaaggaaagaaaagtacaggccaatatctctcatgaacacagattcaaaaatcctcagccaaatgctggcaaactaaagtcagcagcatatggaaaggattatacaccataatcaagtgggatttattcctggaatgcaaggatgggccaactacaaaatttgatcagtgtgatacaccacattctcaggagaacagaaaacacgtgattatctcaaccaatgcagaaaaagacaaaattcaataccctttcatgataaaaatgctcaacaagctatgaacagaaggaaactacctcaaccatccatggtgataaaaaccatccatgaaaagctcacagcaaacatcatactcagtggtgaaaggctgaaaacttttcctctaagatcaagaaaagcgtgtccactctcgccactcctgttcaacatagtactagagtttccagtggaccaattaagcaagaaaaagaaataaaaggtattcacattggaaaggaaaaagtaaggctgggtgcggtggctcatgcctgtaatcccagcactttgggaggccaaggcaggtggatcacctgaggtcaggagtttgagaccaacctggccaacatggtgaaaccccatctctactaaaaattacaaaaattagccgggtgtgatggcacgcgcctgtagtcccagctactcaggaggctgagacaggagtatctcttgaacccgggaggcagaggttgcagtgagccaagatcacaccactgcactccagcctgcacaacagagcaagactccacctcaaaaaaaaaagaaagaaaaatgtctaattacctctgtttgccaggcgcggtggctcacgcctgtaatcccagcactttgggaggccaaggcgggtggatcacaaggtcaggagattgagaccatcctggctaacacagtgaaaccctgtctctactaaaaatacaaaaaattagccgagcatggtggcaggcacctgtagtcccagctactcaggaggctgaggcaggagaatggtgcgaacctggtaggcggaggttgcagtgagcagagatcacgccactgcactccagcctgggtgacagagtgagactccgtctcaaaaaaaaaaaaaaaattacctctgttcacaaatgatatgatgttatatgtaaagaatcttaaatatgccacaaaaaaactgctagagctaattaatgatatcagcaaagtagcaagatacaaagtcaacacccaagtatcagttgcatttctataaactaccaatggataacctgaaaaggattatccaatttgtccaaaaaagacaaaaacaattccatgtatagtaccattgaaaagaataaaatacttaggaattaacttagccaaggaggtgaaagacttgcacaatgaaaactacaaaacatggctgaaaagaaattaaagaagacataaataaatagaaacacaaaaataaatagaatcctatgttcatggattgaaagacttaatagtgttaagatgtcagtatttcccaaagcgatctacagagtcaacacaatccctatctaaatcccagtgacttttgcagaaataggaagcccatcctaaaattcatatagaatctcaagagacccaagatatccaaaacaatcttgaaaaagaagaacaaagctggaagactcctacttcctgttttcaaaattcactacaaagctacagaaatcaaaatggtatggcacccacagacagacagacatataaaccagtggaatagaacagagatcccagaaataaaccttcacataatatggtcaaacgattgttgacaagggtgccaagaccattcaatggggaaaaaacagtctttcaacaaagagtgctgggaaaactagatgtccacatgcaaaataatgaaattgggcccttacctaacaccatacatgaaaataactcaaaatggatcaaagacctaaatgtaaaacatgaaactcttaaaagaaaacagagcaaaagcttcatggcatgggatttgacagagatttcttggatatgacagcaaaggcacaggcaacagaagaaaaaaatggacaactttgatttcatgataactaaaaaaatttgtgggtcaaaagaaaatatcaacaggctaaaaacgcaacccaaagaatggcagaaaatatctgcaaatcatctgaaaatagatgaataaccagaaatttagagagaacatatgaagaactcctaaaacttaatcacaaataaacaaaattcaattcaaaaatgggcaaaggacttgaataaataagacatttatccaaagaagatatcaaatgcctaataagcccatgagaagatgccgaccatcactaatcatgagggaaatggaaatcaaagccacagtgagggccgggcacggtggctcatgcctgtaatcccagcgctttgggaggccaaactgggcggatcacctgaggccaggagttcaggaccagcctggccaacatggtgaaaccccgtctccactaaaaatacaaaaattagccgggcatggtggcacatgcctgtaatcccagctactcaggaggctgaggcacgagaatcattgaacccagaaagcagaggttgcagtgagccgaggtcatgccactgcgctccagcctgggtgacagagcaaatctccatctcaaaacaaaaaaaaggaaacaaaacacaatgagatgccacctcacacccctgaggatggctgctattaaaaaaaaaaaaaaacctccagagaatcacaagtgttggtgaggacgtggggctatcggcccctgtgcgctgttggtgggaatggaaaacagtgcagctgccgtggaaactctacggcagctcctcaaacacttaaatcagaatgacagtatcatccagcaattccacttctggttatcatcccaaaagaactgaaagcagggtctcaaggagacatttgtacacccatcttcatagcagcattattcacaattgccaaaaggtggacgaaaaatccaggatccatgaacaggcaagtgaatactcaaaatgtggtgcaaccatgcaatggagtattagtcacttttttttttttttttttgagacagagtctccttttgtcacccaggctggagtgcggtggcgcgatctcagctcactgcaacctctgcctcccaagttccagcgattctgctgcctcagcctcccaagtagctgggactccagtctcgcaccaccaacgctggctaatttccgtatttttagtagagacagggtttcaccatgttggccaggctggtctgaaactcctgatctcaggtgatccactcgcctcggcctcccaaagtgctgggattgcaggcatgagccaccgcaccaggcttgaaactccatctcaaaaaaaaaaaaaaaaaaaaaaggcagccgggtacagtggctcacgcctgtaatcccagcactttgggaggctgaggcaggcagatcacctgaggtcaggagttcaagaccagcctagtcaccatggtgaaactcagtctctactaaaaatgcagaaattagccgggcgtggcggcatgcacctgtaattccagctacttgggagtttgagacaggagaactgcttgaacccgggaggcggaggttgcagggccgagatcacactattgcactccagcctgggtgatagggtgatagagtaagactccacctcaataaaaaagaaaaaaaaaaggcaaagatggtaaatttatactatgtgaattttatcatgataaaaagcacgcaagaaagaagaaaagcattaaggaaatggaggaaaaggcatcgaccgagcctggacattctccagcatcaaacgtgtgttctgcaggtgactttacctccaccgtgttcatctacatattccaaatgttctgtaataaacctgattgcttcatctcatccaaaagctattacagataatatttcaatcaccctaattaaaacaatcacatgcctttaaaggccaaagttgggcaagaatttaactggccactaattgctgctggggccagggagggctcagccctttgggaaagtgacctggcaggacccaccagtgtctccttccctgtctgagcctggacatctccctgatgtccgacctgaggctccaggtggccctgacctctacacctggctgggacgggtgtagactggattcgtctcctcatctcctggggtctcttgaagaaggaggataatgcagcctccctcaagaggctgctgagacccctggggccccgccaatggcagatgacactgttattacattcattgtcacctgtcacatatcatgaccgtcaccttcattagtgaggacaataccctcccacctccaacatgagcagaggctaccacggcctatgtaagaggcccgggcagtcctgtggcttccagtagaaagccaggcccccccgaccccggcagacagccccatccctggcttcctcacaggcctgcggtgcccagcatgaccaccccacaggggcagggctgttggcaccaccctccctggcagaaggtaaccgtgcccctggtgtattcagagccagccagggatcaccttggccctccctgctcaccaccaggggagggtggtttgggaggaggacgtggcttggataaactttgtcccatatgaacttggagcctccccacccccaccggcctgcaggctgtgctgtgccccttccacccggcccaagcccgcaggctgggccgcagcacccactcggctgccccttcaaaccccactcacatgtctggccctgcaacctgtttcctgcaccagagctggggggggcagggtccccagcctcaatctccctgcaccacccccaccgcccgcagcccctcccactgtgtacaacccgctgcactggaggcccgaggcgtgggttccagcaccatgaccttgggcaggtccctcagcccctctgacctcaggcttccagctgctgtctgcccagctggcctcggtcacctgctcactggctcactggtgccctctcttcctccctaaccccgccccaggtttggggaggccaggcactgctaagggtcagtctgcccagaccagtgtggacacaccaagtgcctgcgagcccctgggagctgcccgtgccaggctggagtgccggggaggggcgaggacagctgcagccccgagatgtaaacaggcttgcaggtataaaagctggagcccctgggcctctccacaccccagcctgacccaccttccagaactctcgaaagaagccaggcagaggtaagccctgccaaggaggggggtgtgggtctctggccgctgaggttatccgagctggatggtgggaacttggaggccttctcttcatccacaggacaagggtggccctgggagaccccaggggacccaggggaggtggggaaatggggtggaaacagaaggaatggccctccctgccagcagcaccactacaagccccaagggggcccccggatggaagacagctgcaggtgcctggtcctgcggggagcacatgtgtgcacgtgtgtgctggcacgagcctctgtgggcacggctacaagaggcggctgtgagctggggcctctgcatagggagctggacctgctcactctgtccctaggcccccaggctctaagtggggatggagatggggtggggctggcagggcagcgagtccaaggcctctggcccccggactccagcaggcacacagagccggctctggtccccacactctgcccctgacccagagggaccccactgcctctatcaccccttcccccgagaggcctctctcatctcagcatctgcccttggagactgggtggcagaggctagttgctgtgggcagaccacagcttccgagaatggaaggtcgggaatggcccggagcagggcatcccagatgtagcaatgctggggcggtgtgtggtctgaggggtcttagcccagcctggaggctccaggatctctagctgtggagggtgggtaaagggagtggggaaacagaggccttttggcagggcctttcctggcactgagggcagcccccagaatctgagcagggcccaaggacagcttgtgtggcgtcccgcagcctcccccggccggacatcccagctcactgggatcccattaaactccagcccgggccgcggatgcacgagctataaataaaccagcagcctggagctccaggcctgcctcccaccctgtctccagcccggatctcgggctcccctgccttcgttgggggcacccctgagagcagtgggattgggggtggtgaacgagcccagcccaggggcacccccagcactgggcagatgggacattggttcctggcttggccacatttagcctggaattcggcccagcccctcctctgtaaaggaggtgacattgggcccggggccccgagtggtaggtgggtgttccctcttccaaaacaggtccccaagatgccagggttggggaaggtgagccagagtcccagctctgaatgaagtggggcggggcctgtcctgagggcctccgaggcccagtcctgccccacatgcccgctcaccaccaccctgctggctgggggaatcagccactgcaggggctgtgggggcccagctccagccccacagcagcgggcaagcccattccccaccatctcccttccctcctggctcctcgcacaaccctgtgaaggggcaggcgtctccccacatcacatggcagctggaggcaccgagggttggggagcaggacctggtccaggggctgcaactggcgctcctcacacctctggggcgccagggttgggttgcaacccttgacctatggcctctctatccagaggagagcagagatgcctctggccactgctcagccccactcgagaacacaggccgcccctcctggcagcaagagcgttccagaaggctctaccaccctgtgaactttcacgagggccaagaagcccaggacacccgcttccccttgcgctctgagatagctgctgtgctgagccccagaacccaaccccccctggggacggcaacctgagagcccagcaggtcacaaggcgctgccgtgaggcgcacaggatggcccggcccctcccgctgacccctctgcctgtgcccagacccccacctgcctggctgggatcccagcatgtctcggggccctggcatgaccccaacactgtgacgcctgtcaccattcccactttacagcaggatccagcaccacgcggcgtctacgtctgctctggcccaagcagcacccccaatccgtgcgtgcaccccacgaattgactccctatccacccaggaccaggatggaggaggacttctcctcccagatgaagaagatggccttggccatgggcacgtccctatcagacaaggacattgagctgctgcccacagacatgagacaccacggtacagcatgcccccgcccggcgcggccccccgcccgtccagccccgctgtggtcaggagacctcatcccttttctggggctgatgggtccaggacaccaggacctgcggcgggcggggacatgggggtgcaggacccggcagcccccatcccagggcggggtcttccctggaggcccagctcaagtgaggtgggcccctccgtgagccccgcctggttgccccagggtccttcaactacctcaagttcttcaagcacatccgcaagctccacgcctcgggccagctggacgacgccatccacacggccttccagtccctggacaaggacaagagtggcttcattgagtggaacgagatcaagtaatggctggcggccacggaggggtggggcccaggccacccagaccacgccgaatgcccacatggcggacccggccttcccccaccgggtccccgctggccttgcagctggcagggctgggccagaaccagctagaagcccaggaggctcagaggcccaggctcccggcccgaagtgcccttgcctacaaggtggggggcgaacggctcgtgagtcactgggcactggccggaagccccttggccctgactcgagcccccttggccccaggtacatcctgtccatcatccccagcagcgggcccaccaccccgctgacagacgaggaggccgaggccatgatccaggcggcagacacacacggggacgggaggatcaactacgaaggtgggggcagcacagccggggcaccctcaggaccctccttcccctgctaggccgccacccttgcccatggccccgccccgagggcactggcacacaactcacagatgaggaaacccaggctcaggggtctgggccgggagtctaggtgctcttccctgggccaagggccccactgcagagaggtggccaggagggctttgggaaggccaactgtggcagagccagcgggtatggggtctcagagctcggggtgccatcttctgggggacccacggtctttgaggctctccatggctgccctgaggtctgggccatctcacccccacacaaccccagtggctggccacaggcctggagggtggagggcacacaaggtgggctgggcctccagacaccgcttgcccagccaccggccgttctcatctgcctgggtctagaaaccccagcaaacctggcttgtggcgggggggtcacaaggcttgacaggcatcctgacccctctcagaactcaggccccccagctgctccgtgcctcagtttccccactgagagatgatcatcaatgagcacctgctctcagagggtctggtgggaattcctgagagtctctgcagagagccaggccactgcaagcccccagtccccagctggggtcaacttgtgacgaccaagcagctgggcccaggacaaacagctccagcgtggggccgcccccggccagatgggctggaggcctggtccctgctcaaggacttggggacaggaccccctggactgtgtagtccaggcacactccctctgcctcctctgagagttaaagggcctacaggaactgggggacacaaaacaggggtacttactttaaattggtctcctgctctagaattttctgaattgatcaaaaaggagaaaattccaaagaagaagtagcaccatgactagccctggccagccaaggggctcccatggggtaaccggggtgaccacgcacctgggcagaagccgttggggccggtaagaggcggcagccgtgagggtggacccagcttttgaaggaaaatggaagaaaagcagcattaagtgaatgacgcagcctggtgtgtctgttggggatgctggtatgaactggggtgggggcagcatcagggccatgggtgacaacggctggggggcagggtgggcgtgtgagggtgggaatgaagacgtcttctcccatctcccagccccacctggctgtgggcagcccccaagggcaaccctgtagtgagattccatccgggtgggcctccggtcagcagggtgcacagtgctctctgggcccaaacccctgaagggccccttcccaatctgcaatggacctggcctgaggccacgcactcccagtccatacctgaacgcagtatggggacacctgcagcccctgggtgcccccggcaggggcctcgttccaggccaaagcacccagcagaccctccacctccatctcttgcctgctcaggcccccgggccgggcccttctatctcctggctgcgtgtctccctccatggtgctcctctccccacttagtgcttccggcaggaccccagcccagtccttggtcctctgtcccacccacactcacctgcctggaaccccctcatctggtggcttaagggcctccagccccggcagttcccagcccccaggtcctgtgagcggcaggggtctgggtccccttggtgccattagtgggtgtgggtgttgccctccagctgctcactggccacacaggactccaggccctctgggctggtggcacggagggtgttgggagcctgagtcccggctcaccccagaagggaagacacccgcccatcaggggaacccttgctggacttacgggagtgagaacacagccattccaggggcgagtgtggcaatgtcagggtctatttgtcgcagcagcaagagtgaggctgattcacacaccatcctcacagcccacctgcgtgtaactacaggctccgtcgtgaaatacacacagagcccactgcccgcaccaccctggccatggtcactctcgcctgggcaaccaccacagccccctggttggtctctccacctctaccctctgaaggtccttcctcatcttggtgtctggagggctctcccctcacatagggtgactctaggggcctcaggcactctgactcccactttccctctgacctgagacccccaggtcctgcccctcctgatgcagccacgtggcccccttgcctcctcagccaggcgccaccttgccctggggcctttgcacctccagccctcagcctggcatgctcttccctagacatccggctgcaagacagactctctcttcttcgatgttttctgcaaatgtcgaatcccaatgaggtcgtctttacctgccctgtttgatatttcactcaccctcgccaacatcctgcatccccctagaccaggtcttttccccaaagcattccccatcccctaatatgctatgacattggcgtatgcacgcgtttattatgagcaaacaaagcaggggtgctaagatccagagcaggggagctctgagaggtgagtgcaggcggtacaggctgccccatcgggcgtctgccagtcagcagtgggactgagagggcgccgggcggcctcctgctgtccagggcctgtccgggaggaggggctttggctacagctgctatgggctacccagtgggagtaagaacagcagagaacccgacccgacctcaccaactggaggctgccctcaccgtcagtgcagagcccagagctcagcccctcccctccccgtcagccacagccacagtgagcccaccggacagggggttggcaaaagtcagtcccagggccagatccagcccaacaccggccaaacctggttttggactatctggggcagctttcgcgctgtgctcagaggccatagaaagtttgaaaataaaaagaaggggccgggtgcggtggctcatgcctgtaatcccagcactttgggaggctgaggcaggcggatcacctgaggtcaggagttcaagaccagcctggccaacatggcgaacccctgtctctgcagaacgcacattatttttaaatatgtaaagcatttaccaaaattgtccaaatgctgggacctaaagtgagactcagtcaagtcaaaggactgaaatattatggaacattctctgaccatagagaagctaagttagaaatttaaaagataaaaaaagcagcacagttctaaacagcctatggttcaaagggaccatcctgcaaatttggaaatgtttcccaccaaagaagaatgaaaatacaacacgtcaacttgtggctgccgctcaaacggtgccttgagggaaactcacagtcttagacgcacagactccaaaggaaaagggcctgggaatcaatgatctaagcatccttcccaagaagttaggaaaagaacaaaaaaggaagctcgcaggaggggacagaaataaaggtgggcattgtgaaatgttaagtttcctgctttctgtccgtctaccctgctggaacataaacccctcgagggctgggtgtggtaacaggcacctctagtcccagctacttgggaggctgaggcaggagaattgccgtaccccaaattctaggcctggcatcgacagcacgtggacttagatgatttggttgatgctgtgaactgtctcaaagaagcaggctctgccagggagagaatggagcccatgagggcggcgagccaggtggggtggaatgaaccccgggcagagtccatctgtgcttctagggtctggcccccgccccgaagccctccccccacccccaactgcccatcaacctagacagggaagtgaactagctggggggaagggagcccagctttctcaatggtaagactcggggtgccccccaccgtgactcagagacccctccaagcccctgaggacctccacagtgtcttgctgggtgaagcccacctctgtgttgctgtctgttgggcactagaactacctggagcagaagcagcgggaaggctcagggcaacaggtttgacctggggcctttcccggaaggctggggcctaatagctgcccctggagcatagagccgcccccttcccaccccactcccagcctcccgcactccactccccacagggaggagaaacgccatctcagcccccttccccaggcacccctgtccaggtgaagccgcctggcagacaggccctcccctcaatgttccagcctctcagggacacctttctcatcagcacaacacgtgaggccacgtgactggagggcagcagagacaggaatgatacgcagccccagtctcttcatctaaaatttgaattaaaacccaacaggctgggcatggtggttcacacctgtaattccactttggggtgggggtgatcacttgaacccaggagtttgagaccaatctggtcaacatagtgagactgtcctcaaaaagtaaaacaaaagtagttgggcatggtttcccactaccaggtagtcccagctacctgggaggctgaggccccaggggatcactggaggctaggagttcgaggctgcagtgagctataatcgcgccactgcactccagcttgggcgacagagcaagaccttgtctcaaaaaataaaaattaggccaggcgcggtggctcatgcctataatcccagcactttgggaggccgaggcgggtggatcatgaggtcaagagatcgagaccagcctggccaacatggtgaaactccgtctctactaaaaaatacaaaaattagctgggcgtggtggcgggcgcctgtagtctcagctacttgggaggctgaggcaggagaatcgcttgaacccgggaggcggaggttgcagtgagccaagatcatgccactgcactccagcctgggcaacaagagactgtctcaaaaataaataaataaaaataaacaaataaaattaaaattaaaacaacaacgagaaacaaaatccaagagatgcaacgatccagaggcggccccaaatgcaaaaggccctccacacgtccttgtgagccaacaaatgaaggactcaggaatgaaggagaaatgaacgagcaaatgaaaaacccatcaagcaggggctgggaagccggggatgcccccagctgaaggccacacccgtttctcactccttttctggccatgagtgtcccaggcctcttctcaccatctctgtggaggtcaccctgtgtgtcctgccggagaccttgtaaacatacttagtttagtaattcgcagccatttcaatgataaaaataccttttctgcggccagggcacccgaatgtgagccagaacagaaagcttgctttccccgcagaaagcttggccctgcactgctcctgggagccggttcctgggggcttcagctgcggtgacggaggtgtggggctcaggacttgagatccacaggcccccgttctcagagcccgcctggccagctgagctcacatttgggtgaagctctggagttaaagcccagctgagtgactcagctctcagcaccctgcagccagtgtcaccatcgtccctgggggccactgcccccacacaggctttggtgaggcctccggagctttgtcctcagcatggggcctggccaacagcaactcatcataagggacacggctgtcatcctcggctcctctctgcagcctcaccaagaggtgcctgggtctcaccctggcccgggagcaggccctgggagtggggtggcccctgagctgagcctgagtgcccaagacaagcagggctcacagtgacctaggggatggcagaagccgcccctcccaccccctaggctctgtccctgctgtgcgtttcaccttcacacaggcctggccctgtctgcaaaagggggaaggcccagcagtggttctgcgtgaccaaccacgaccccggggacccgcactgccctgtcctgtgctctggataccgagcccagtgccacacacggctccaggccgagcctccagctctgattccaacatccggatgcccacctttgggcctcccgccacgccccaggtccacaagcatgatttgcacacagtcccctgaagccacattgcctgggccctgtccctgttaggggcgttttcctagttcacccctgaggtcctcagctcctcctggcttgggctccccgaggcctggacctgggaacctggggggtggtgagcgagagggacccactgccctgcaccccctgccgggtgggggacccacaccagatgcaggacaaggcccatctcactcacatccctggtcaccgaagcccgcaaggggaccagggacgatgccacctggaaggataaagacgtaaggaccaggacatgccttgtgtccagggcagtgacttggccagcaggatggcgctgggcacgaggacctaagcctggccagcccctcctgggggaaagcaagcctcaggcagggtgttggagcaggcctgggtagccagcagcacctctgttccacagggggcttcccaggaccccaggcagctgctgcggccagggaggtcctagccatgctgcaggtaggaagacaggctcgggggcgatgggtctacccggtgcagacgccgggacactgtggtgtggcagcctgagcgaccccaaagcccggtcccaggatagtgcggcctgcttggagacccttgtctgccaccaagcgttcaggcgcggctttggacctcccatcccagtgagatggcatccaacactcacttcctggtcagtgtagacggaggtggagggagggctgcccccctgaggatttggggcaggttctgaactgaccaggccaagctgacctgggctgagaaccaggctgggtgtgaagagatgctctgggccagtggtaccctctcctgcctgggaccttccccagtgcccccatcctcatgggtgggccctgtccatccccatttcttgagagctccagactgtcacaccttgacagcggggagggtagggcttcctgtccctctggagtctctccagccataggagcacgctggcagccatgggcttccagcacctgcagggccacggcggggccctcggagctcctcccagggggtgagttctgctgagttcctcctgcgcctggccaggaacggggtagggaattccctgtgcttgggacttccagggtccagggcaaggcagggaacaggaacttgggggttgggttgaatgctggggagctgagggctgagtgcaggggggctgctggctgagtgctgggggctgctggctgagtgttgagggctgctagctggggggctgatggccaagcttcgtgatttcctggtcagcctgctcaggctgcggaggggagtgggaggaagagagccaaacccacgcctggctgctctgggggtcttgggcagcctctagcccaggagagaagacaaggcagtcactcaaggcgctgaaaacaacggcctcctttactgttaaaatgcagccacaggtgcttagccgtgggcatctcaaccaccagcctctgtggggggcaggtgggcgtccctgtgggcctctgggcccacgtccagcctctgtcctctgccttccgttcttcgacagtgttcccggcatccctggtcacttggtacttggcgtgggcctcctgtgctgctccagcagctcctccaggtggtcggcccgcttcaccgcagcctgcagcacacccacagggtcaggcctgctcccagccccgaggtccagcagggctggccacagggactcacctcatgttgtgtccggaggctgctcacggcctcctccttcctcgcgagggctgtcttcaccctgtgggtagtacatggtaggcttcagtgtggcccccgccccatgtccccagagtggcctgcagtgcacagggtgcacggggcagccgcctggtcagcctggtcccagccctgctgaccacgactcctgtggctggcccagacagctgtccaggcaacccacctgctgtgagtcaggacccaacacaggccactggagtatgaccctggccacacctggggaggcctggtacccagatggggtgggacacctcgcccacacccacctctcagcctgtggcagcagatggcacaggaaggatgcaggacccccgtggagggagctcgctgggaaccttacagtgccccagctctttcagcgcctgtccacccagcccagggccccgggagctgactccctggagaactcgccaggcccagacccgacccactcgggtgccccaacagggatggccgacaccctagactaagcaccagggaggaaaacagatctaggtctcctgggccccaaacatggaacccacaccagcctctgtctacagggccctgtctctgcatctcctggccttcctcagccacagcctcctggggcttggagctgcagaggtcctgcccgctcccctgccccgcctccgtctccagccctgcagcccccgccgcccacctccggtgcacctcctccagctccagctgctggcgggcctgcagcgtggccagctcggccttggcctgccgcgtctcctcctcagaggctgccagccggtcctcgaactcctggcggatcacctgggccaggttgctgcgctcgctagaaagctgctcgttcacctgggtgggcacagaaggcagtgagccggctgccagcgactggctgcgtgcatgcaggaggggcctgtgggtgcccactgcccacctgacacccgcccactcaccgcctgcgcatcctccagcgcccgctccttctgccgcacaaggccctgcagacgcagattctcgccctcggcctccccaagctggcccttcagctccgagcaccgctcctgaagcttccgctccgactgctccagctcggagagctcggcctcgtacttgtcccgtaagcgcttgatgctggaggtggggggagggcagggtcactccagcccagtcacacacgggtccttgcgcctcagctcgtgggcctccccagctggtgacccagccatggcgggtccttaccggctctcggcagccttctcactctcctccttggccagcgccatgtcggcctccagccggtgaatgaccagctcaatctccttgtcccggcctttccggatttcttccctcagctcctgttcccggttcagcagccacgcctcctggggggacatgcgctgcctgggggttgccacccggagccggcccgcggggccagggccagcctcagggggtcctggggggctccaggctctgagccacaggggagcaaggggccttccccctctccagacccctgtccaggggtgcgctacgtcctgttgtcaggacccagtgtgggcataggcgtaccagagatcgtcatgatgcacagcccacggtcccctccctcagagacccacagcccatgacaacctgaggccaccttctgctaccagatgggatgggaaagttggacttgcgtgttgctgagggcggggcctgggcccccaagcccaggcattcagagcctaagctggcagcctcctggaagcctctgaaaactcccagagtttcatctgtccagccctgggccccacagggctacgtcgggagcatgctactgggcccagaggcatccactgccaaagcctgcctggctgctcggtgacatcccagcccaccagggtgtgaaaccaggtgacgggcacggtcagcctggactgtagcctcgcggcgggcatgggtggtgagaatgtgtgtgggactgtcaccgtggcagagtccaccccccacagaaggccccagaggctaaggggggagcccctgttgtgcgtgtccctctcggtacatctgagtgtcagtgggctggtcgtggggcgcaggggtgtagcagcccctagcgagaggggcaacgcctgttctcggaccacagaggatgcgctccaggcacccttgatccttccagagcccacgcaaaagatgggctgaaagcaacacactcagcgtcagttcagacaacaaccccaagcagccagatgtgactcccagaaacgagcccccaggatgccacagcagcagcaaaacccacctggggcagcccccaactcctgcccacgcagggcagcccccaacccctgcccacctgggtgcccaggcccccacctccttcctggtgcggccggcctcccacgcctgcctctccagctccagctgctgcttcagggtattcagctccatctggggggcggacataagaggccagtcagtcccaccccgtgcagccccctggccaggcccagcacagccctccggtggtagacctggtgccggcgctcctgctcctccctgcccttctcaaactcagccctcagggctcgggtcagtgcagagctgctctcctccagctgctgcctcagctcttccagctccgcccgctgcctgcggccagggaggagtcagcaggtgaggggtcatcgagtaaggagtcagggatgggagaggtcagcgggtgagggggcgggggggaggggtcagccagcgaggggtccctgggagagggcgtggtgcccccgggcggcacctggctgcctgctggcccagccgctccctctcctcagccacctcactgtacagccgctgccgttgctgctgcagcgcccactgctcctgctccaggtgctgctggaacctgcgggacggtcaggactggctctcgggggccgggacgggcggtcccaggacccacccaccgcaggggcacgggccgaccacaggcctgactcacagctggagagcagccctccggggccctgcccctccccctcggcagtcaaggcccctcaaagccaccgcccgggggcaggcaaggccacgaggaacttgcccatcagccaagcgcagcaattccctgagctccaggccctcgtggcactttgggaagtggctgtggagccgcgtccaggcccccttttccctcagcccgtgtgccggcctcaccctgttcagcattgccccacgggcatggagggcgggaggcaggtgcctcgtggggccttatccacctcccctgcctccggcctgagggtgccaggtgcctggctccgtgacctgagcaagctcgcgccagggcctcgtcctgaccccaccttcgaggagagactgggggaccagccaagctgcatctggggaggaccagccacgacaggcaacagggtggataggagagggtggcttccaggctgtcctggtggcgcagacagtgcaggaggggctgccactgccccctgtggcccgcagatcctgaccaccactgggcacgtccccagcccccagggctcaggacgcaagagcagcagtcacccctcagaccccaggccaagggagtgaatgagagagaccgtccctgggccccaaggtcagagctggaggggcctcgaggccgcctatccacgggttgctgctctggggccagttgtgaaagagtggatgtctggtgggggttcccagccctgaccctgggaaaacacccgtgcacccatgcagaacctgcagacctcggcgggcatgaactgcagacacaagcccgaggacactggcccggctgaggctgggcccccaagggccactccagggccaagggccctgcgtcctccctgcatgctgcactaagaccctcgcccacctctacatgggaactccactccagccttcgaggattccgactccccgccctgagggtcctggccccaccggcctggggccaccacccaccgctgccgagcacgttcgcgctcctgctggcccagcgcctccttctcccgctccagctgctcccgcagctcctcggcctggcgcaggcagcgctgcgaggcccgctcatccgactgcagcagctccgcctcgtgcaggctcttgagcctccgcacttcctgcttgtgccttgcaatcagcttctggatctcgggctccagacctgggggcggggcaccagctagggccacgtccagctagggtgggcccgggaagtccaaccctggcacaagaccagcctgtctcaggcccagaggggaccccgcccacccagggcctccttggatccaacccgaagcacagctgagtcttgacgcccacgaggtggggaagagacccccacagggccacggcgcctctcccagcctgtggggctcagggctcctgacactcctggtgctaccactgacggctcccaggcaccctggcaggtgtccagagcgagaggaccaggcctcggggagccctgcacatcacccaagggtccgaggccccttcagaccacaacacccaccagcctcctgccccatccgcctgcctgcccctgcctcctcctgtggctcactctgcttcccgtggcagggcccacgtgccacagtcgtccacaaactcccaatctcccctagcccaaccctgaggaagtgaggcactgagccccctcgtttcaggcaactgcctagatgctgggggctgggccaggctcctgtgtggagcccacctgccccccgggtcacggcagaagccgcagcggaggccgtgacgggggtggttggggcatgagtgttcacctctgcccaggaaggtctcggactacatgaatgcctgaagttatggctctctcaaaagaagccctggccgcagcacccaccccacacctggccggctcatgggaggggagggcccacctcggacagtgacctccttgatcttcttggttttctcactgatccacttctcccggcgggctttctcggtggcgctcattaattctttgagttttttaatctcctacgagcagaacagggcaggaggaaacgacacgaaggacacccccgtccctttgccaccctgtgggcacagtcagggccgggcttccaggtccaccagcacaaggccggcactcatggttgggtgtgctgccccgagacagagccactgctgccctccccagcgcccggggccaggctggaggcccaggcccaccctgccacacaccttggtggcctgagacatgggagggcagccatcagcctgcagaggccttgccccagagaggggtgctgctgcctgtcgggacggccccagagcctgcattcttccatgggactggcagtcctcaaccccggctgtcagccacagtcacgtgcagggattttaaaatgccagtgccaagccccactccagaacctgggctcgggaccatcactgcccaagctggtgggaagcatagccagggaggctgaggcccccagggagctcacacagcgggaaggggcggggagtcaatgctccaccgacacctggtcagtagagagagcaggtcccatggcccaaggacctggcagtggggcagaccaggcagaggctcctgggtccacggctaccgtgctgtggccgggcagggactgtgcgtccacatctgtgacagcaggcccacggccccgccccagagcctggcagctagagaggcaggagtggaccagctcggtgccacggtgctcccccagacagccccacccaccgctgtggccctgacacaccgagacaggaatgaggactccaagtccggtcctgttctgggggctgtgccagctgagcctggcctgtgagccgggcttgggacgccgtgcagtagggagcaaagcctcaccagctcgtgctgcgcctgtgcctgggccacacgctcggtgcatctctggtcctcctgcttcagctcggccaccacagcctcgcacttttcactcaggaccttcttgtcctcaatcagctgtgttggggaccggaggtgaggtgctacaccaaggccccagcccagcaggacccctgatggaggagaccctcccagcctccgagggaggctaacagcagccctcccctggggctgcccctcctaggtttgtggatggaccctggggccagtgggggggcacgtgtgcaaacacgggcccaggcctgcatccgccgtcctgtcctcagctgggggacccggcgaatgtcagagaagccccagcccaccccctgcagtgatgtcagggtcttcctgggatgagggtagctctgccgaggccatcacccagccctggaggaggctcactgtctgccaaagggtgtcaggaccacaccagcctcactgccggccccaggccagaccccaggtcaggacacacctgtgacaactatcaagcagccctggaggcccctattctcacacaccccagaccaactctaggtctcttctcttcagaacaggagccaaccggggctgcgactgagctgaggggccggcaggacaccccactacactcacacggggcggctctggataaagacaggagtgccctctccagggcatgcatggctgggaatggcatgggaaaggcttggaatgcgtccagcggacacccgtgtgacacccaacagaggaagaagctccctggcagtgggaagcccctggctctggaagtctccatgagccacgcgctgggtccgggcctctgcgctccccgggccgctcacctggtcaatgaaggccaagtgccgctggatggtggcctcgtagtgctccctctgccgctgcagctgccggctcagcgccttctctgtctccttgacccgccgggccgtgaggtctcgctgctgcgcctgcagggtgtgggcagaggagggaagcgctaggaccggtgggcctggcctcagcaggtaggaggctagcagggcccgggattagcagtgccagcagcgttaccagcgctctctgcagcagcagcatggcctgcttcttctcctccacctccagcttcagccgcatcacagacgtgctcacctcggaccccagctccaggggccccggccccgcctccggcacccacccctgcagacacagccgagcgtcaggcggaagcggcagaggacggggggcagccaaggacctgacacgatgcccctgcggccctgccctctggggacagaggggctgctgcacacgggagcccgtgggaagccggagggcaggtggcaggcggcccagcagaggtcgttttcattgctcagtacaggaaatgggggccgtggcctcaggaataaaaaacaaaccatttaaaaagttctatgctgcccagcttcctgccctgtgacaataaagttcacgtcactgctccatttagcctggccgctagtgttcacccaggacaaaccaacccagaggacagcagggctccagagggctgaactatccacacatatgggctcgtggaggcagctcggggcagcgggtaggtgggggcagtatggggaatgcgggccctgccacctccaccctgagagacccgtggggggtgctgcataactaggtgggtacatggtgagggaccacctcctgctgggggccgggtgggggctggcgagagacctcctccccctgggggccaggtgcgggctggtgaggggcctcctcccccgagggccaggtgcaggctcgtgaggggcctcctcccactgggggccgggtgcgggctggtgaggggccacctcctgctgggagtccagctggtcctgcccagacttctccatctcgtccaagaagctcatgatgctttgtagcttggcctccgatagcagcgtcccatcctcaggaggttcggggaacgcactgagttttccaaatttctccaagttgtcagctgtcagagagctggcgtcatcctcctgtgggacaggagcccagcatcgggggctgtcagggcagcctgaggacttgggttccccaaaggcagaggtggcagctgaggctgggctctgggagggagggttgtgactaaagccaggaggagcctgtggcatccccattttcccaacccccacagccaccgcatgctctgtgtgaatggcgtgggtggacagactgtgcagggcgggcgcacaccgtggtcacctcgctggcccaggcgtatctgcccctgtgatgggtcctggggcggggcagcacgtccggctccttctccagcagctgcagtgtgtgcagcagctcctccagtggccccctggacttggcgctccccctgctcggggccatcatctccaggttgtccccagctgcatcctgggcaagaacgtcctgcaaaagagcagggagacagatgcagcaaggctgctggtagctgagagcagcccccacataggaggccaaccgcagagccccaaaggcgccgcgggagctccccagtcccgacattcagccccaggaaggtgaggccagggctcagaccttcccacccggtctctgcagctgctcaaacccagagcagctccagccaccaggggactcctcccagtgccccactccaggaaaacaggagtgcagccacctggccccaccattgagcagcctgggagccttggctgtcaggtcacccctcagagccggaagctcctcttttgtggatgaggatgcaaggccccccaccccaggacatctgcaaaaacccaactggatccaccccagcaaaggctccccaagaggcagccagcaccatgcatcagagcaagaagacacctcctgggtggcctctctgagcttaagtggcccctagagcagaggaggggctgggagaagctcagctcaggacacccctggcacagacatggcccttaaagccaaaaaccatgatggagtgaaggacagctgtgctcagacctgcgtcctgtcctctggaggctgctgtggttctggggatgagtcggaggtgggcaggcagcggtctccggggcctgcagcagggaggccaccacctgcacagcagaacacagcaccattccacagggagcatcccggggcgggcagcaactctggaggcacccccgggaaggagccaggcatgggggaggcggaggcgaccccagaagcagaggagccgctggggagccacggccttctgggtgtggagctgtggaggatgagtgccacccctcccttccgggccttctactctgtagggatccctacgtccaggaccatttgattgtcaaggtctcggcaccctcgtcaggtcagctgggggccaaggcccctaactccgaggactggggccgccaacatgggcagcagcacaggaggccgagaggaggtccacaagggctgcacttccttcctggctgcagtccaccccccagagcagggcgggcgtggagccactctcaccagtattgttggccttgagggcctggtgggcagtgccgcctggtgtgggggacagctcctgagcaggctgccgcattcctggcactctggtctccctgggattctcaggtggcccacgctcggcagtgctcgccttctgggctctcagggctcgtttctgttgcagctcctgcagtgggagcatcgctgagcactgtccctgggagaggacgaccccaggctccacagccaagctgccctgaggctaagtgtcccggggcccagggagccccagcagcagccccgcacggtcaggcctgggccacggtgctgctcagtggtccctgcgcggtcagcacctgaatggctgctcgcctggcttggcgtgccttctcctcccgggccttcctcctggctgcctctttctgctggtgcaggtccaagagggtcccctcgcctgaccgctgccgctgctcctgccaaagaagccggtgccatgtggcgtttacatctggaagacggaatccagacccagaccagaggtttccccacaacgccctggagtcccctagagttcgtggaatctcagggccagcagggaaagtgaaaccccaccaggaccttgaacctgccatttctctgctctacagaggatgagccctacgtcgcaggtggccaacagttctggcgtgggggagacagctctgcccccacagaacgtcctcctgagactctccagcctgggatggacccagcaggcgtttcctgacacccaggccctgaggaccgccagtgaggaccaccctgactgtccgcggggacccagggtcaagaaggatgctgcacccagagacggggcccacgagcaatcctaggctttgattccacctgtcccagaaactcaaacccctgggattctgggccagaccccccgggggagcatggagtgactgagacgcccacactgacctcccgcttggcctgaagcaagtgctccaggcgggcagctcctgctccgcgccgctgcacctggtgccggtaccagcgctggatggtgacagtggcctggttcacctggtggataaacctgcccggagagcaggactcagggccaagacaggaccagcgccccggcaggacccagctggctgctggtggaaggtcgagccggggaagagagaagccggcggctgcactcaagtagcccttttcacaaggcaggaccagcccacctggaccattttcacatggcaggaccagccgcctggaccagctccactaaaacccaaaaccttcttcctgggaaggtgcccaggggagaggaaacgcctacccacgcaggcctgtgtggccttatttacaattgccaggaagtgggaagagttcaaatgcccatgacctggctacagcgtgaatactggatggcgggaccctacccacaggcaacaggcccgggactcaggccagtgcagaccacaggccgtggctccacagagagggtggtcggaacaggcagggctatgagggaacagactggtggctgctggcatctgggcggggaaggagctcgagggaagcctggtggtgctgggccgtttccttatcttggtctgctgtgtccacagacagcactatacaccctggtggaatctcatggaactgcacacttacaatgggcaccttctattgtatacaaattatactaagtaaaactgattaagcaaaaaaaaaaatgcttcaccttggctctcgggaccatgtgtggattctctcagcaaaggcactaacagagaacccagaacgtgtgagccctagctcgggagcagtctgccccgggcagaactggggggcttcaaggggttgcgggcttctggtcccccttccctcgtgccacccaccgcgtctacaggcctggtctccctagccctaactgggcggtagggtaggtgacggctccgccaggagcaggctccgaaagtccaggcagggaggtacccccgcgactgtcctgacaagaaacgactgtcatggtcacaggaggctccgcccacagcccctccagctccccaggggcaagcggcaggggcacagcccccaacagtcatcatcacaggaggctccgcccacagcccctggagctttgggtgttgttggcttttttcagttctgtatcttctttgcctttaatgttgttttaattaacagttttactgaggtacaatttccatactataaaatctacccattttcagtgtacaagtcaatgatttttagcaaatctagagttgtgtgaccatcagcacagtgcagttctggaatgttccactgcccctggaggagccctctctgccacccctacaccagccttcgacctcctgtgataaacttgcctttgcttggtgttttatgtaaatagaaccacaccacatggggtctgctcggtctcaatattttaaaacaggccgggggtggtggctcacgcctgtaatcccagcactttgggaggcggaggcgggcggatcacgaggtcaggagatcgagaacatcctggctaacacggtgaaaccccgtctctactaaaaatacaaaaaattagccaggcgtggtggcgggcacctgtagtcccagctactcgggaggctgaggcaggagaatggtgtgaacccgggaggcagagcttgcagcgagcagagatcgcgccactgcactccagcctgggcgacagagcgagactctgtctcaaaaaaaaaaaaaattaaattaaaacaattattaaatggaaatttctatcctcggaggtgtgagccccccagaccctgatgcctgcccacctctgtgttctaggctcaggcccccccccaccgccccaagatcggtcacctctcagcctcctcctccgtcacctccttccgcctgggcaagcccgtgctgcccccagtattgttccgggctgagtgggtggcactggagacattcttcggcagcttcccaaagccgctgctctcactgccctcacaggtggctgccttgatgatgttgctgacaggtaagaagaaaacaccctcgtctcaccgcccaggggaacagctctgcccacaggcagcaggtgcccactcccggaagtcccaggactgagcctggaagtggtgctggcaggctggcagccggggcagagggggacagcggcaggtgcgaggccggctctcccgtgccacatcctggcctctggaccacctgtgccctgacaaggtcccactcactggtacccaggataatgagctctttgcatttaaaaacttctcactaaagttacattgagaggctgggtgccctggctcacacctgtaatcccagcactttgggaggccaaagcgggcggatcacctgaggtcacgagttcgagaccagccttgccaacatggtgaaaccccatttctactaaaaacacaaaaaaattcgctcggcatggtggcgggcacctgtactcccagctacacgggaggctgaggcaggagaatcgcttgaacctgggaggcagaggttgcagtaagccgagatcatgccactgcactccagcctgggcaacaagaatgaaactccatttcaaaaaaaaaaaaaattccattgagaaagttcccaaaagtcacaggagtccagagcctgagggacccctgagcaaccccaaggccatccccaatccccgcaagaccatgtggtggtggactcgggggctcctttgccccgctcggtccacccccgctgtgacgccttctgggctctgcacaagccttggcttcctcctgggggccccacctcagggtgagccccagacctcactgtgccacatctgggctgttttctctctgtgggaagctgccgacccaagaacagaagagggcggcggacgtggatggggagcccggttcacagctgctccacgcggttttacgtgcactgaccacgtgccctgaccgaggttggaccccatgcacactgaccgcatgccctgaccaaggtagaaccctgtgtgaactgaccgcgtgccctgaccgaggtcggaccccaggtgcactgactacatgccctaactgaggtcggaccccgcagccccgcggcctccccagaagaccttacttgagggagggggcagtctggttggagctcttgagcggaggcgccctctccgagggggtgtagcggttgtgcaccatggtggtgacgcagttgcccactgctcccttgttgctcctgccaggccggaagagagacaggaatggtcaggcctctggaggggacgcctgagatctcagagctacactcgcagcacgggctgggagggaacaaaggccttcagtgcttgctacgtgctggcagcattgtcgtccagtgtccccaggccccttccacagcctgcgccctgatgatggggttcttcccaggacaggaaagctggaccaggggctcccacggggcaggggatagaatcgaggcatgaacgctggacgtgcccaagacggggggagcagctcaggccagcagctcacaatcagcttccagagcagactcacagaagcgaagccccatcccacacgacggatggaagccacattctctgcctctgcccctccgcagacccgcaggaaggcgggaggacaggaccaataccgaggctgacaggagggatggggagactgcaggaaaggggcatctgcagacctggaggattagaaacagaagggccagcagagagcaactgggacacaagggagggtccaggcattgtggggagggagggcgaggagctggcaggtcccgtgcccccacggagacacactgttctcccacaggcatggacaggctttgaggcaaaggggagaatctggctgctcggcaaagccccttccctcacttgagccgctagcatccaccctgccctccccagctggccctgcaggtggggcagagatgggtgattcacccaggacagccaccgccacccctccccagcagtgcaaccgggcagccaggactcgaaccctggggcgggctgggggtttgtctctggagagactcagcctgtgaggagggtcccacagacactggtaggtggggatactcaacaatgccttgctctctgcaccagtgccccgaagtgaagccaccaggcaataggcttccagctaactcctagggcctcccttttaacaagaaccaccaagacatctgggcaaagaccaacatgtcagaggcccaaaatcaaaccaacagaacatgatgggaatgaggataagcagagagcagagcaatgcacgaaacctgctcctgcaccagcctgcacctgcaccggaccacacctgcaccagcctgcacctgcaccggaccacacctgcaccggaccacacctgcaccggaccgcaccaggcaccagcccacgcccagcaccagcctggcctgcacctggcaccagcctgcactcacaaacgttcaacagctggttcttggagcgcggctcatctgccaatttgggtggtgtgaataacctaccaggactgattttgagctgttcaggaatgagcagcatggcatgtattcataaatgttttcaataaaacactaaatggccgggcgcagtggctcacacctataatcctagcactttgggaggctgaggcgggtggatcacaaggttaggggttcgagaccagtctggccaacatagcgaaaccccgtctctactaaaaatacaaaaattagcctagtgtggtggcacacgcctgtagtcccagctacccaggaggctgaggcaagagaatcactggaacccgggaagcggaggttgcggtgagccgagatcacaccactgcactctggcttgggcgacagagcgagacttcgtctcaaaaacaaaaacaaacaaacaaaaaaacaccagaagaaatagcttgaaaagatgctgctcctcaggggcaggcgccaggggtaggaggggcggcaagagtgtgggtaggaggggcagcagtggggtaggaggggcagcggggcagtgggtggggggtaggaggggcagcgggatgggggtaggaggggtgggggggtaggaggggcggcgcgggggtaggaggggcagcgggaggggaggtaggaggggcaggggtggggagggtaggaggggcagcacattttaagcctatggtgctgtttgacattttggctgtgtatgaacatataactgataaatactaaggtaaattttaggaccaggtgtgggggctcaaacctgtaatcccagggcttttggggaggtcaaggaaggaggattgcccgagcccaggagtttgagaccagcctgggcaacacagcgagacttcatctctacaacaaatttaaaaattagccaggagtggtgttgtgcacctgtggtcccagctgctccgaaggctgaagggggaggatctcttgagcccaggaggtagaggctgcagtgagctatgatcgtggactccagtcagggtgacagatgagaacctgcctctaacttaaaaataaattaaaaagcaagaattgagctgggtgcagtggctcacgcctataatcccagcactttgggaggccaaggcgggtggatcatgaggtcaggagatcgagaccatcccggccaacatggtgaaaccctgtctctacgaaaaaaatacaaaaattactcgggcgtggtggcgtggtggcacgtgcttataatctcagctactcgggaggctgaggctggagaatcgcttgaaccagggagtcagaggttgcagtgagccgagatcatgccaccgcactccagcctggtgacagagcaagactccatctcaaaaaaaaaaaggcaagaattcttcctgtgccaaccctggagaataaccacacggtctctcccctgagactattcccttggcaaaggctctaaatgccggaggaaaaatgtgtccccaatcccttccactcatgggtcccctgaggcctagcccaaggagcccacactctccttgaaggctcagaggcagctgcctggagtctatttcttttggagcttccccaggaccccctacaagcctcctcagccaaggcccctccccaggccccaccctctcagccccatgtgagcctccccaaggcctgaaactctttaagagcaaagcctgggccgagagccccttatgtgcaagacgccacctggcagcctcctgcctatgcccttgggaatgaaagccattctttcactcactcactcattcattcattccaaagcaccctgaacgagccataaacaagacaaagacacacacagtctccactccaggagcttcccactggtgcccgtcgtgggcacctgcacaggtcgtacctgttgttagcagtgaagttgggggccagggccacggtgcattctttcctccgcgggcccgctggtgagtcaagggcactggaactccgggcattggatggcaaggtgaagccccggggctggtcatcctgtcagacagctcagcccatgacaccgcccgcacacacccagacaccccatcccttccctgcctctcccacaaacgggaggagccaccaacttcccatacagacaggtggatgtcctggggtctgccatgtcagatctaagcttgacaccctccctgcagtgcccttttgcaaaggcagtgagaacaaattaggaaccaggccacaatcccatcacagagaccaggacgtggggccgcatgcaccaccttaccaggacgttccaggtggctcccttctcgctgggggctgtgctcaggctggcaggcctctttttcccactggggctgccctcgaagagcatcaggaagtctgtgggctccgttggcctgcatccgagagagggcggcacacaaggaaagagtcaccagccgggaagccgacgctaggcacacagaccaggcaggtcccgcgaggacagaggggctgaggcactagcagcaactctgtttctaggcccaaagcccccatctgaccactgtgcctggccagggttcctcagtggagctgggcgttcagggtgagcttccatcagaagcttcatcagtcacaccgatcacagtttctggggacaagggccttatttgttttttcttttcttttttttttttttatgttagtagagatagggtttcggctatgttgcccaggctggtctcgagctcctgggctcaagagatcctctcaccttggcctccaagagtgctgggattgcaggtgtgagcctgcacacccggctgcccaccgagggccttaaataccgtggctgcctctgctgccaccctcttccctgtgaaccaagagccacacctgctgctgctcagagcagaaggggaagcacagctggaaggcatgggctggtggccaatccccactgccaccctgccccatgggaggccacagctgcgccgaacacaactgatcaggtgggatcaaaaccgtggcctggctgagggtggtgacacaccaaacacaccacacacacacatacaccacacacaccacataacacacacaccacacaccatacaccacacacaccccatacacacacacacaccacacatgcaccactcacaaaccacaccccagacacacaccactcacaccacacacccacacaccacacaccccccacacacaccacactcacaccacacacccacacaccacaccacacacacacacttatgccacacacccacacaccacacacataccacacacacacaccagctggccttggcagtcccttgcttggtgggactccacgaagctagttgctgagctaagagcggctcccggaggctgcactggatagggtgtggtggccgcagttcttggtcttcccaggaagggtccacccggggcccttggtgacccagaactcagccttcattaggtccacggccccacaggagcaccctgctcgctcggggacaatgcctggtgggaggtggtgtcaggacctcgcccaccactctgggctagaggatgtccccccggaggctgctggccaccaccggctccactccccacaacacccccactggggccattgaggcagctcctccccagcccgctggtttggaggccgcaagggacagtggcagggtttaagtgggcaaaggtgggaacaggggcgcacagcgtgggggttcagaagggtcacagtgctgcccctctcgcaaatgacagcttttgacattcagagggcaggtggaaagggcttcagcggagccctcaggcagggtcccagcagccgccgggacagcaaggaggaagggagggatgcagtgcaggagagtgtctgcctcaggcctcccgccccaatgcgagaggaggcctgggacacaaagctggcccgtgaggtcactccaggcctcactagccagcaagggcccgggacccaggaggctggaggaagggcagagcagaggcagggaggagcaggccagggtggggcacctgaggtcccgggaaggggccagggttatccaagggccttaggggttacctgggggagccgctccgaggctggctgacctgcgtggtgctgttggatcttctaaggttgttgatggcctgggagcccccaggccctgtggcctcctgcaaaaagggagaaaacagttaattatgcagcaaaggctcactcaccagtttgctcagcctccgccagctttggagaaacgcagtcagagaacagaggggtggccctagggttacaggtggcccaagtggcctcaaaggcagtgggtggtcagaggggcaggagcactggacagcagggcagcgcgaggggggctcaggcccgacctctaagagcttccccgtccccgcatcaagcaggagcccttcacccctggcagagggagggcgggaagggagctgctcactgtcacccaccagctcccaggaaccgcgagctcccaccttcagtggatgagaacccctggggacccttcaccccgcggtctcctccgtcagcagggtgggcacccagagcgactctgtggggtcacgatgaggactaaggagacgcaaccaagaccaggtgctgcaagacctggtagtgagtgcagccaactgcccagcggttccaggtccgtggaaaggggtggaggggaggctgcgcagcagacactaagcaaggatcagagcgctcggagaagcggacgctaagcgaggatcagagcgctcggagaagcggacgctaagcgaggatcagagcgctcggagaagcggacgctaagcgaggatcagagcgctcggagaagcggacgctaagcgaggatcagagcgctcggagaagcggacgctaagcgaggatcagaccgctcggagaagcggacgctaagcgaggatcagagcgctcggagaagcggacgctaagcgaggatcagagcgctcggagaagcggacgctaagcgaggatcagagcgctcggagaagcggacgctaagcgaggatcagaccgctccgagaagcggacgctaagcgaggatcagagcgctcggagaagcggacgctaagcgaggatcagagcgctcggagaagcggacgctaagcgaggatcagaccgctcggagaagcggacgctaagcgaggatcagagcgctcggagaagcggacgctaagcgaggatcagagcgctcggagaagcggacgctaagcgaggatcagagcgctcggagaagtagcgcttggggaagtggcgctcgggaaagtggcactcataagtaccttacgctacgctccctgactttcctgtaggcttaaaaaccctccaaatcggccagatgcagtggctcacgcctgtaatcccagcactttgggaggccggggtgggcagattaccaggttaagagatggagaccgccgggcgcggtggttcacgcctgtgatctcagcactttgggaggccgaggcgggtggatcacgaggtcaggagatcaagaccatcctggccaacatggtgaaaccccgtctctactaaaaatacaaaaattagctgggcatagtggcgggtgcctgtagtcccagctactcagcaggctgaggtaggggaattgcttaaacctgagaggcggaggttgcagtgagccgagattgggccacggcactccagcctggagacagagcgagactccgtcaaaaaacaaaaacaaaaaaccctccaaatcaaacatttcaggggaaagggctcacagtccagtgggaaacggtctggggaacaccaccggatgccactggatgccacggcgaccagtgatatagatcctggccaggtgcccatgccaccacaggatgggacctcgggtctccagtttcccaggaaaagagacctatgaactttcagaattatttttaaatctgaatccttaagctgaaaacaacccaacttcaaaaaaagaccaaaaaaaaaaaaaaaggctccaggaaagcagccacacacatgcaccccaccaggacaccccaatcacttgttacgggcatttcctggtcaggaaaccatggtctaaaatagctgaacagaaagtgcaggcagggagcccagctcggcggcagcagagccggttaaaggaggccagacagaggccactgtgaggtctgggggtggaaatcccacgagcgcgtgggcgccaccattcttccagagaaagtactcacgggcttggtcataccttccagaccaggctacagacagtgactaccagagagcaaaagctaacacccaatacaagacacagccgccgccccgttctccacgctggggccacagaggccctgtgcaattcctcattcaatccctgctgggctgtgctcccagggccccaaactgggcgctggaaaggtgttcgggaggtcagaaggcagggtgtggggagcacaacagcaggagaggaagggccccatggaggcctccatccttctaggagaaacaagatgccttctgggaagcctgggcagtgcccatcagacagcaagtgcccaaaagagagaccctgaaaaggggtcagtgaggagaggattgacaaggggctgagcacaggcttggtgacctggaggctgctggaggagctgaagagacgcagaaggggcagcaggcagaagccacccatgcggcagggactgcaagccctccacccctgggaggcagacgccaagtccctgaggaaagtgcctttgtttaccaggggccttgggccagcctgagggtctaaatacgtgatttgtggccaggcgtggtggctcatgcctataatcccaacactttaggaggccaaggcgggtggatcacttgatcccagtagttcaagcccagcctgagcaatatggtgaaaccccatctctacaaaaaataaaaaaattagccaggcgtggtggcatgcacctacagtcccagctactcaggaggctgaggtgggaggatcacttgagcccaggaattagaggttgtagtgagctatgatagtgtcactgcactccaacctgggcaacacagtgagaccctgtctctgaaaaaaaaaaaaaaagaaaaaatagaaaaatcagcaaagaacatggacaattcatagaaaaggaaatatacacggctcttaaaaatatgaaaagatgtggccgggtgcggtggctcatgcctgtaatcccagcactttgagaggccgaggtgggcggataatctgaggtcgggagtttgagaccagcctggccaccatggtgaaaccttgtctctactaaaaagatatatatatataaattagccgggcatggtggcacgcacctgtaatcccagctactcaggaggctgaggcaggagaatcacttgaactgggaggcggaggttgcagtgagccgagattgcgctactgcactccagcctgggcgacagagcaagattccctctcaaaaaaaaaaaaaaagaaaagaaaagaaaagatgttcagcctcactcacagatgttaagttagaaataaaatcagaggtggagggcgaggtgctgtccaagcagccctggacaggagtggggcccgtgcagagggactgttccgagtagccccgggcaggagtggggcctgtcagcctaaaggcagaggggctcttcctaatagccctgggcaggagtggggcctgtgcagaggggctgtcccgaggagccgtgggcaggagtggggcccgtgcagaggggctgtcccagagcatagcacagcattggtggtgttcttcccatggggtttgggttatccactgtgacaccaccttacacaccttacacacacacaggagctaaaccagggacagcagacgatggggccgcatcctcactgcaggaggggaggttacaatcagcaagcgtcgggggggcgagaggtgccactagcggcagagacatcagtaggacgcacaacaccaatggttactaggtaggttactatctatagacagtgtgtatattacacaccaactggcgtacactacatacttccttgctctgttggctgagaagaccagaaacagcccagtagggacaagcacacccagctcccagaccttggtctctgagaccactctccaagaaaaagaaccggggcttcttgaagaaatggctgattctaggactggaggaggaaatagacaagatgaggctggagcagtttatagggccagaaataaggacgtgctcagaagacaaagtgatgggcaatgacacagggacccaggagccacctgaaagttcccagtggccaaagctgtgacaatgagagcaacaaaataagcaaactagcattgaattataacttgaagtgtaaaataaatatccacgagtccattataataaatgattgaaaaaattaataagtggggccaggtgcagtggctcatgcctgtaatcccagcactttgggaagccaaggcaggaggatcacttgaggtcaggagttcgagaccagcctggccaacatggtgaaaccccatctctactgaaatacaaaaattagtcaggtgtggtggcacacgcctgtagttctagctactcaggaggctgagataggaaaatcgcttgaacccgggaggcggagattgcagtgagccaagattatgccactgcactgcagcctgggcgacagcgtgagacactgtctcaaaaaaaaaaaaaaattataaatgagggtgaacagacaaatctcctgtgtagaagaattccaaataacttctatagatgctcttctctaaaggagggggagcaaaactccccaccccttccatgtgggctgaacaaagcgacttccttccagagagcacaggggatgggcgacctcacagtggagaagcctgaccctccaccttggccaggggaccaaggccagcagcatcaccagtgagaggtcacatggacagtgtggaccccagacaggatggggtgagaagagtactttacctctgtggccttcctcctagaacccatccaccacccagtctgatcacgagaaaaatatcaggcaagggccaacagggggccattctgtaaaatccctgaccagctctccccaaaactcgaaggtcatcaaaaacaaggagagtctgagaaactcacagcccaaacaagcctgagacccacagcccaaaaatcatgtgggatcctgggacagaaaagaaaaactgcaaaaatacaaatcaagtgtggactttagtcagtgatttaccaataatgacttgttaattgtacacgtcccatcataatgtaagatattcaaatagcagagactgggtgcggtacaggggaacaccctgcactttccaatttttctataaatttaaaactatactaacataaaaggtttatttttaaaaatcgtacagtcacgccggaggctcacgcctgtaagcccagcactttgggaggccaaggcgggcggattcacttgaggtcagtagtttgagaccagcctggccaacatggtgaaatcctgtctctactaaaaatacaaaacttagcccggcatggtggcaggcgcctgtaatcccagctactcgggaggctgaggcaggagaatcacttgaacccaggagacagagattgcggtgaggtgaaatcacaccattgcactccagcctaggtgacaggagtgaaacttcatctcaaaaaagaaaaagaaaaaaataaaataaaaagtaaaaagtaaactaaaaggtagtacagtcagatatcttttgttacatatggatcctgtaaaggccaaaactgtgctgcacgtgtgccaaccagagcacgagggagcaggccccgtggcaccctgtgatgcgagtgtgacttagggcaatgatctttacggacagcaacttggcaatgcctatcaaaaaaaaaaattttttttgagacggaatctcgctctgtcgcccagggtggagtgcagtggcgcgatctcggctcactgcaagttccgcctcctgggttcacgccattctcctgcctcagcctcccgagtagccgcgactacaggtgcctgccaccacgcccggctaatttttttttttgtatttttagtagagatggggtttcaccgtgttagccaggatggtctcaatctcctggcctcgtgatctgcttgcctcaacctcccaaagtgctgggattacaggcatgagccaccgcgcctggccaaaaatttacaatttagttttaattttaattttaaaagatagagtctcactctgttgcccaggctggagagcagtggcatgatcatagctcactgcagcctcaaactttctgggttcaagccatcctcctgccccagcctcccatgtagctgggactacaggcatgcaccaccacactcggctaattttttaatttttttgtagagacaggggtctcactatgttgcccaggctggtctcaaactcctggcctcaagtgatcctcccaccgcagccacgcaaagtgctgggattacagatattggccaccactcccggccccctttcaaatttttttatttatttaattttttttgaaatggagtctcgctgtcacccaggctagagtgtggtggtgcgatcttggctcactgcaacctccagcttccgggttaaatcagttctcctgccttagcttcctgtgtagctggcattacaggtgcctgccaccacgtccagctattttttctatttttagtagagacgaggtttcaccgtgttggccaggctggtctcgaactcctgacctcaagcaatctgcccacctcggcgtcccaaagtgctgggattacaggcacgggccaccgcacctggcccccctttcaaaattttaaatggacttatgctctgacccagtagttatcctttaggatttattctacaggcgtatttacatgtatgcaaaatggcaaagacacagggtatttgctgtgccactcttggtactatgataaggaaaatccagaggagcactgggtgaagttctggtgcatcatctgatgaactattgtcagctgctacaaaacaatgtaaggaaagcgggagcagggtcaggtgcagcggcccacacccgtaatcccagcactttgggaggccgaggtgggaggatcgcttcagcccaggagttaaggaccagcaacctagtgagacccctgtccctacaaaaaaattaaaaattagtaggctgggtgtggtggctcacacctgtaatcccagcacttcgggaggctgaggcaggaggatcacctgaggtcaagagttcaagaccagcctgaccaacatggcgaaaccccgtcgctactaaaaatacaaaattagccgggcatggtggtgcatgcctgtaatcccagcttcttgggaggcagaggcaggagaatcccttgaacccgggaggcagaggctgcagtgagccgagatctcacaaatgcactccagcctgggcaaaaagagcaaaagtctgtctcaaaagaaaaaaaaaattaaaaattagctgggcagggtggtgagcacctgtaatccatgctactcaggatgctgaggtaagaggatcacttgtgtccgggaggtggaggctgcagtaagctgtggtttctccactgcactccagcctgggcaacagagcaagaccccgtcttaaaaagaaaaagaaaagagaatgcaggagccccacgcagctgacggatacggcacttgttccaacacatctccagcatcactgatgcctgtgtgcccagagtaagtgtgggtgcaggagaaacagaacagtggccgcctaggagaggcccgcaaggtcgggcaggacaggctcactgctcaatgagcccccttttcccaaatggtgggtgtgaatggcctattcaaaacacatggtaggaattttgaaatcatcccccaaaatggcaccagtcattgcatcagggccatgggattatgggtgcccttcatcctgtctccattttcctggggtcagtttcgcagcctccaagaggaagataagggatgtcaggggagggatgaaggggctgccactcactgacggacaccacggtggaaaggcaccactcatgctcagatggtaaatcaagtcatggactaaaaaccctaaactccacctgcaagaaggaggcaacatcgcccagggaggggcaggtggcccccatggccatgacacatatgcacagtgatgtctgttccccagtgagcttgtgctcttgggatttaaagacctcttttctttaaggggaagggaaccagagtgaataatgatctagggggctagaggatcaggtgggcacacagctggggcaaggaagagggaccctctacagtctggcaccgacatctcttgagccagaagaccagcaggaactgcagttacatcctggatggggaatcccgggacagcaggccgtggacgcaggaagatctttagagacaaggggtagagtggaaaccccaggccaatggccaccgagaaggtctccgagccaggggacagcaccccaccccacccacaaacaccaggaggaagagaatcacgtgccgccttgtacaggtgtgaagccatgcctggccaaaacaaatgctctccaggaatcccgatgagactgagtggtagcagggcaggtggccgagaggatggggaccgggcacaacagaaacccctgaggtcacgtcacacactggcgggggttcctcttccaccagcagttcccgagctcccaccatgggcacaacagaaggcagacaggcatgcaggggtggggccgtctcggatcgagcgagggcctcaaagaattgaagtgaacagctggaacattccatgaacgaggggactgttagcagtcgccactcaacactgcgggagcgggcaatggtaccagccgaggaaaggagggatcgatatgagtagcgctcgctgtggctttgaacctctactcagcaacagaacatttcccagcagaaaggctgggagtgtggttaggtgcctgggtcggccgcggatagagcctggccatgccgccgaaagaccatctactagaaagcccggaaacttttacaacagtctccacacaacaagagagctgcaatttctttctttctccttctccctctccctctccctccccctccccctccctctttctttctttctttctttttttgagacagagtcttgctctttcgcccaggctggagtacagtggcatgatctcggctcactgcagcctcctccgcccgggttcaagcaactctcctgtctcagcctcctgagtagctgggattaagggtgcgcgccaccacgcccggctaatttttgcattttcagtagaggcagggtttcactatgttggccaggctggtattgaactcctgacctcaggtgatccacccgcctcaacctcccaaagtgctgggatcacgggcgtgagccacctcgcccagcccagatctgcgatttcgagtgcgtcttccccgccccatgtgccatgaacctagggctttagaaacagcgggaggggccaaggcaggtgggcgagggggtcagtgacgcaggagcagggctgcggacaggagaggcagcaggctcagagacggctctagcccaagctggttacccctctgctaaaacagtgcagcatatttttattttcacagcttacgtctgtaaatgcctagaggcgtaccacatctttagacaacctgccggccacaatgacacatcaggacatcccgggtccccgccctgctggcccaggctttgggaacctgcttggtccaagggtccgctactggcccggctgcccttaccccggaactcggctagccgtctggcgggccacaccctgcccacctgggggtgcttctagggcagacacaggaataactttttcaaggagaagggggaggtccaagccttttattcacagtggaaccctggcctgggcctgccaggggttcctgtgggaagcctcaactgccctccagaccccttctctctgccctgctatgttgcctggcacggacctcaggcagggagccccagaccggctgccgcatggaagccaaggcccccaggcccttgctattcggaagctcaggccagactctggtcaggctctgccccaacccccacagagcggctcgattcctcccttgccccaaagactgggcctggcagacaccaactcagggtgcagcaggcccggcctgcctttcacagcccccatctgggaaccacccaccctcctccctactcccagaggtgggcaggaaaggcagctctcaccccgaagctcccacggctgtcctgctgcccacacacccacacacccgtctaggtttctccaaggccaccaggagctcatcacccctccccacaggtcaaccccatttctttcttttttttttttttttgagatggcatctcactctgtcgccaggctggagtgcaacggcacgatctcggctcaccgcaacctctgcctcctgggttcgagcaaatctcctgcctcagcctcccgagtagctaggattacaggcatgcaccaccatgcccggctaatttttttttgtatctttagtagagacggagtttcaccatgttggtcaggctggtcttgaactgctgacctcagatgacccgcctgcctcggcctcccaaagtgctgagattacaggcgtgagccaccgagcccagccaaccccatttcctgaggattcaaacaaatccaaagggcggtggcacaggaggcctggggctgttgctgaaagaatccaagctctggcttgactttctagtgattcagcacccacgcctgtaagactcaagtcctacctgcctcctggaacagccacgaggatccagcatgtccagatgtgaggcacttgttcacctgtggagctggacccaggggtcagatgccaactgaacaacagccctccaggaggcaggggcccggactcctaggccacagtactcaccagcaccttcctcttctgctcgctgcctgtgaccacggagacagagcggacgatgggcttggtggtggcggcactgccaggacgccgggacacaggcggagggagacctgtcagactcaggtccacacctgctgggctgcgctccgggacgctgccgatggcccgggtgcctttcatggtggacaaggcaggtcctgagcggggaagcaagagctgcaatgagatgccgtgggggaactacagtcccctgcacccaccatctccagcccagcctcagctgggtccactggccaccaaacttcctgggaaggcctgtcacaacctatgcacccctctggctggtggcaggctcctcgacaggaacatgagggagctgttctgagcccaatgtcagtgtatgccagggcaggagggccctggatgatggacaggtgggtggcgagggcaaggcccgtgggtgggaataagccagcagcaccccagagggagcctgggccacaggccattgtcgatgtgagccaggttctgccatctaccccacaccgtgattctgagaaagtcactgccccgagccccactgttttcttctgtaaaagggacatttgatttattttttattttattatgtttttgaaacagagtctcgttcttgtcacccaggctggagtgcagtggcgcgatctcggctcattgccacctctgcctcccgggttcaagcgattctcctgcctcagcctcctgagtagctgggattacaggtgcccgccaccacgcctggctaatttttgtatttttagtagaagtagaaacggggttttgccatgttggccaggctggtctcgaactcctgacctcaggtgattcgcctgcctcggcctcccaaagtgctgggattacaggcatgagccaccgtacccggcccctaagtaaaaatacacattttaaaaaggggttgcgtgttggccgggcacagtggctcactcctgtaatcccagcactttgggagaccaaggcaggcagattgcctgagctcaggagttcaagaccagcctaagcaacacagtgaaaccccacctctactaaaaacttcaaaaaattagccgggcgtggtggcgagcgcctgtaatcccaactacttgggaggctgaagcaggggaattacttgaacctggtaggcggagtttacagtgagccaagatcgtgacactgcactccagcctgggcaacatagcgagactccatctcaaaaaaaaaaaaaaaaaaaaaacgcgggagtggttttgtgaggtccagacaagatgctggtctcaaggcctcaaggctgcaccgggcaaacactccctgggtaatgtgttattccagcaggggacgggggttctgacgatcgatcgaggggattagcttggggatgctggcttccttactttggaacttctcagagcaaaccctgccggcccccagcccgtccccacatggcacctctttctgaacgagtctttctgatctttctgaacgggtctcagctcgtgcatgtgcccctgccaaaaaccctgcaacagcttcctaggcacagagaataaagtctacacatccaactcctgcaagatctggccctgtactctctgtgacctcgccagctcccctgctgtgcccctttgttgtggctttagccaacacagcctccctggttctcctcaaactcagccagcttggccccggccagtcccctgcctctaggtctcaggacactccctccctgcactcagaggccttccttgagcacccatcactcttcactccccatccggctcggactcccttcctgtggccgcacacagttggtttatgaattgtgtggctcctgagcaaccccagcacctgcagggaaaggcactcagctgaacccgtagatgaacgggagaagctggcgccagggaccaacctcgagaattacctccctgccacggtggcctccagtaggccagcaggcacccagcctatcgcccaaggtcaccctgggcttccttcagcccggcaccccacagcaggtcccccaaggtcccttccacggagcgatggatacccctactccctagaggctgaccctgccactgaccaggtcccagtcctcagttatgcacttccggctgtgcggaagaaacttaacaccctcctcctgcagggcactgtccacccctggctggacccatgcaagcccttggagcccaggactctgctctcccagccacacttgcaagcggctctgggatggcgaacggggcctctccatggaaacctccaagccagaagaagggaggcctgggaggccactacatcttggataaaactgtgtccctcccaggacctgaaggggcggggactgatgaccagcgccaggacctggttcccagggtgggctgaccctgaccctgaccctgaccctggacagagaggccagagcccacgcgcagagcagagccctccacttgtcctcagggcagctcccatctccccattttccccagggcttaaggcagccgggccagagatgccgggactggactccatgttgtcctggggaccggaggggagtggagggaggtggagagggtggaggggatggaggtggggacccacaccctcaggcacgagcctgtcttcacctgcgcgggccccggacctccctcacctgtgcgcaccctggatccccctcacttcccccggatcccgccttcaattgcgcgggcaccagatccccccactcacctgtgcgtgccccggatccccatcacttcatcactggaccagggcctcccacctgcgcgggctccggacccctccaacctccgtgcgccctgcaaccccctcccttgcccgggcccccctcacctgcgcgggccgggggcgcagccgcgaagcctgcctggcgcgcggggcctgcagattcggccggcggggaggggatgcggaaccagtcgcgcccaaacctcgggtcggcgacctggcgccccgccacccccaacactgccccgaggcccggtgacaatgaagcggccggacggccggggtgagcagcggcggcagctagcaaccagcctggcaccacctccccagcccgtcacgccggcccgcctttcctgcgcgcgccgactccggattggcccttcacgctcccgctcaggccgtcccgggagctcattgggccgctcggctgtccttcgggaagttcaagcgtgggaggagcggcggatggctgagggacgcgactacagagagcggccgattggacgcggctggaaaggggcgggtcatatagggggcgggggaccgagggcggcgggaggagctggccgggcaggggcggggccccagcggttgtgggcggggcgtgaggtgggggtgtgatgggcgagtagggcgaggcagatgtgggcggggcaaggcaggtgtgggcggggcacgcagggcctggggaggagacaccagggagggcgcgaggagcacgcggcctcggctcggctccccgacacccccaggccgccgcactcccgcggcccggggctcccccagtgtcctaggccgctctgtccccacccacgtgcgcgactcccctcgttactcagtacgactgcgagggcgtgtgggcgccttgctaacctccctgacctccttcccttcgcgctgctttgttgttttttttccttctccaaagttttaacgctgcgccccgtgcgtagccgctctgtgactccccctctctccgggagccctggggattccgcccaggtcctctccagggaagccatccttcccctaaaagtcacagcacactggtctcccctgcccccgctttttaaaaagtccagtgctctgtaaaataaaaagtttggtttcagtaaaatccacattttttggtgtgcagtggagttgtgtaactttagttacagaacattctccctccggatcccgtacctgctgactgctggtggcggctgctcagttctctctgttctccatccctagaggcagccttttccagaatgtcacacaaaagggatgtcgcgcagcgcgcctgtgggtctggcttctaccacttcgcattttgagattcatgctggttcctctttattgctgagtggtatcctgtaaccggtgtgaaccaccggttcagatggttttatttattgatggttttattcatcaaatgaaggacgcagagattgttcctggtgcttggcaattatgaatgacgctgccataaacattcactcatcggcttctgtgtggacacaacttttcatttctcttgtgtaaatacccaggagtggggttgctggatcaaatgattgtttataagaaactgccggccgggcgcagtgggtcccacctgtaattccagaactttgggacactgaggtgggcggatcacctgaggtcaggagttcgagatcaccctggccaacatggcaaaaccccgtctctagtaaaaatacaaaaaaattacccgtgcctggtggcgtctgcctataatcccagctactcaggaggctgagtcaggagaatcgcttgaccccaggaggcagagattgcggtgagcggagatcaccactgcactccagcctgagcgacagagcaagactccatctcaaaaaaaagaaaaagaaaaaaaaaaggaaaccgccaagctattttctttttcttttttttccttttttttccgagatggagtctccctctgtcgcccaggctggagtgcaatggcatgatcttggctcactgcaaactccacttcctgggctcaagcaattctcctgcctcagcctcccgagtagctggtattacaggcacatgtcaccatgccaggctaatttttgtatttttagtagagacagggttttgtcatattggccaggctggtcttgaactgctgacttcaggtgatccacccacctcggtctcccaaagtgctgggattacaggcgtgggccaccacatcggcctactaagctattttccaaagaagttgtacagctctacgctcccaccagtgccacaggtgttgcagttgctccccatcctcctcagctcttggtattgtcagggattggttttatttgtttacttatttatttatttatttattattatttttttgaaacagagtctcgcatttttgcccaggctggagcatagtggcgcgatctcagctcactgcaagctccgcctcccgggttcacgccattcttctgcctcagcctcccgagtagctgggactacaggtgcccgccaccacgcctggctaatttttttgtattttcagtagagacggggtttcaccgtgttagccaggatggtctcgatctcctgacctcgtgatccgcccgccttggcctcccaaagtgctgggattacaggcgtgagccaccgcgcccggcctaccacattgtcttgattagtgtttttgttgttgttgttgttgcagagatggggtctcacatgttgcccaggctagtctcaaattcctaggctcaagcaattctcccaccttcacctcccaaagtgctgggattacaggcatgagccactgcacctggcctagagtcaatcctgaaatcaggttttgagtcctttgttcttctttctccaaattacctaggctatccaaattcttttgacttttcctataaatttgagtttcagcttgtcactatcttaaaaaatatccagctgtgattttgatggggattacattaaatctgtagacctgtaacctggaagaattgacaccagaatttatgaacatggtatatctctccacttatttagatcttcattgatttctttcatcagtactttgaagttttcagcatacacatcctacatatatctttctaatttatacctaatcatttcatttttggagtgccattacagatggtagttttttatggtttaatttccaattgtttattgctattacaaaagtgtaactgatgttagtatatttaccctggagcctgtgtctttgctaaactcacttcttagtcttaggaagtttttggtagatttcacgggattttctacaatcctgttttctgtgaatagtatgttttatttcttcctttctaatgtgtctggctttctagttttttcttgctttatcgaactggccagggcttcagtgtaatgctgaacagaaatggttagcatgcacaccatggccttctttccaatcataggggaaaagcattcagtccttcagcattaagtatgatgtcagctgaggggtttttgcagaaaccccttgccacccaaaagatctcttacatttctaatttgtcaaatttgggagggtttttgggtcatgagtgaatgttgaatttgtttcttgttttttctgcataaaatgatcatgtgatttttctttactgttaatatgatggattgaattacactgattttcataggttgaaacagccttgcattcctgggatatattccacttatagtgatgtattacactttttatatattactggattcattttgttgttttcttgaggaattttgcatctatattccagaaggatattgatctctagttttctagaccaagtgtacatggaacatccaccaagataaactatattcttggccataaaacaaactttaacaaaagtttgaaatccttaacaaaagtgtgaggccaggcacagcagctcatgcctgtcatcctaatactttgggagattgaggtgggagaattgcatgaggccaggagttggagaccagcgtgggcaacatagcaagagctccatctctaccaaagaaaaaaaaggccatgtgtggtgactgaggcatgaggattgcttaggactgcttgaactcaggaggttgagactgcagtgagctgtgattgcaccactgcactaggtgacagagctagagtgcagtggcacaatcatggctcactgcagccttgacctctggagttcaagcaatcctcccgcctcagccacctgggtagctgcgaccatgcctggctaatttaaattttttttttttttttttttgtagaaacggggtcttgctatgttgcctaggcttgaaatctttaaacaatataacagaaatcatataaaatatgttctctgactatatcagaattaaatcataacacaatatgctttaaaataacccattggacaaaacggaagtctcaagataaatttgaaaatattttgagctgaataacaatttaaatgtaccaaaattcataggatgcagccaaagcagtgttcacaggaatgtttatagcattacaaggctcacattagaaaataaaggacatgataaataatctaagcttccaccttaagaaactgaaaaaggctgggcgctgtggctcatgtttgtaatcccagtgctttgggaggccgaggagggtggatcacaaggtcaggagatcgagaccatcctggctaacatggtgaaacccaatctctaccaaaatacaaaacattagccgggcatggtggcatgagcctgtaatcaatcccagctactcgggaggctgaggcaggggaatcgcttgaacccgggaggcagaggttgcactgagcccagattgcgccactgcactccagcctgggtgacagagtgagactctgtctcaaaaaaaaaaaaaaaaaaaaaaaaagaaactgaaaaaataaaaataagcccaaagcagaagaaaggaaataataaagaacagaaattagtgaactaggaaactgaaaaacagaaattagtgaagtacaaaaaaaaaacaccaaagtttgttctttgaagtaactaataacattaataaactgtctgaccaagaaaaagggaaaacaagtgaccaatattaggcatgaaaggaagagtgtgatagtgtgactacagccccacaggcatgacaggaagagtgatagtgtgactacagccccacaggcatgacaggaagagtgatagtgtgactacagccccacaggcatgacaggaagagtgtgatagtgtgactacagccccacaggcatgaacggaagaataaaggactactacaaaaaacggaatcacaaattcagcaactgatataaaatggaccaatcccctgaagacacaaactgctgaaattagaaatagataacccaaatagtctattatttattgaagaaactgaatttcatagtttaaaaccttgccattaagaaggtgaactgcaaggacagtgccagtgggaagttctaccaaacgtttcaggaacaccgcctgtccctcctttgaggaaagcagtcctctgtgtgtgccccttattgatggtattttcattaaaatgcacatacacaaaaaaagaaaaataagcggcccaggttcatgtaaacagtagtgtttattcagaaagcataaaccccagcgctcttggaaggtttttctgagatggaccagaggctccaatcagaggcttcgtgtgtaggaagcaattacagcctaaaggagcaggtgagagccagggaaggatcacgtagggatctgagacttgaaatggcctcaggccagacagcacaaggcagcccggacaagacaccctcaacccacatgcaccaaacccagcctcagcacctagcccaccccgatgggacgggggagcagtggcttgttgctgctcatgacctcctggggaaggagggagctgagatcaaaatgaaataaggaacctggtagtcgcttccgcattcatacaagaaacctcatgtctgagagcaagacaggcagggactgccccctgagagccctgagatcgacatttctgaagccctgccacctgccatccctcgtagggattcaagtccaaatagccagagcctctggcagaggagatgggggaaactgaggtagccctagggtcgtcctctcaagtcaagctgcctggagactgtagcagctacggttgaggctgctcaggaagcacagaccgccccagacagcagctgaagctgaagactccagggccaggccatcgggtcaggcgttcaggaacgcgaaagctgacggctctgagccaggaggctctttggctgctgtcctctgggacgatgtttggggggcgcggggagcatcaggacaggactctcccgcagcagccccagcccccaccaggcggggacaggccaccagctccatgccagcaaacaaggagtcgcggctccacgcacagctgctggggcctctctttgggctgtccgtgccccctgggatccgttcaggtctccaccgcctgctttctgccagtctggcctcggcctcgctggggtctccgggggctggaatgggggaggcatctgggggtggggtgggcacagggctggacggcatcccagatgagggagcagggctccgggacgagaccggggttgaactcagaggctgcaggaagacctggctcccagggagaggcacagcgtcggtcagcaggtcagatgggcctgggagggcggctgtggggccaggctcagctgaggtgccccgggcaggggacagctgcccacaggaggcctcaaagtgcctcaggatctgaaagaggaaggaggaaccagggaggttcctatgcaaccctgggaaatgtggggaccagggcccgcttctccctaggacctcctcagtccctccacccagagggcagggccacctctgggcaggacaccggctgctgggaggggctggggcagtgcacccagttgtcatcccaccgagagcagctgctgggctggtgctggcgacacggggcaggtgtcacatacacacctcgaatcttgctcctttactcactactagacaaatggacaccctccccgtcataacccgccaggcactgccggagggagtgaacacgtggcctggcacatctgggcatttccaactgttggacgcagggttcttccagcatgcccgttttagaaaccccactatgaggttcgcctgcggtggtgcgaaccccaggctcactcgtcgctctgactgaaaggtgagctagcagatggccaatgacagttaaggatgacttggggatgggtgactgaggacctgtgtttccagcagccagggagaaaacaggaagaaagaagctgggaatgcccacaggcagagggaaggtgccagggcctggcggccgggagaggcctccccgtgtgattccagtggccgccaggcagttcagagtgttcaagtgcacagagatgaatggaaccatttctgccctccggagcttgggagttgagcatgagctgtgtcatgggtggcaaactgcatgtgcagtcagggagggcttcctggaagaggtaagtgtgaggccaagacacaagggcaggaacattaaggcagcggagtctgggggcttccaggaataggtagaggccagtgtactgtgagtgctgcagagtttgggtggaaggcgggaaggcaatggggaggtgaggaccctgacttgctgctgctccctctgccagcgggacagggacttgagagggggtccgggaagggctgaccaggcgccgggcagggacggggtggccgtggactgcagcgtatctcccactgtacccttggaccccggtgtgcgtgtggcctccgcagctgcccaccttggtggccttgttggtcacaggtcccgggctgcccatgctgagctcctgcagccacggccgggtgcggaggaggatgtgctcctgggggaggaggtcgctgctccccagggaggcgatggcacacagcgccctctgcgggtgaagggaggggacatcagcacccatggggcagcaggtccacgccagggaggcctatttggccatctctctccctcttcttcctcctcatcaatgactggagtgccaggaggccccagagacagctccaccacagccctgtcctcaccgccttacaccccggatcccagacaccacagccctgtcctcaccaccttacacccccgctcccagacaccagagccctgtcttcaccgccttacaccccagctcccggacaccagagccatgtcctccccggctcctggacagaccccagcgagaagcacgtgacctgctgccccgattgccttaccttcattcctccgcacgccccccgacacacgcacacacgtgtccacactttcatgtgcatgcacacacacacaggcacatacatacacaaccacacacatgcagtcatgtacacacacacacagatgtgtgcataccacacacgtgcacaagtgtgtacacaccgcacacatgcacgagtgtgtacacacacaggcatacatacacaggcatacacacccacacgcacacacacaggcatgtgcgcacgcacagccacacagaggaatgttcacacacaggtgtgcacacaggcacacgtgcacacacacgcacacgcacacacacgcacacaggcacatgcacacagtcacgccctcccgcccgcgtgtgcagctcaccagctgcgtgcattcactggtcccacgcaggtggcaggtcagcagctgcagcacggcctcacagttgagcagtccacacctgcacagaggggacacctgggtggcgggtgcggcccgttccctcctccctcgcccacggttggggctgaggcagagcagggcgggtccgggcgcactcacgctttgatgaagtgctgtgcctcctcgcggctcaggaaggcgcgtggtccccgagtcacagtcctcaccaagctcaactcctgctgacagtcactcagggccaccacctcgaccctgccagggggaatggccgggtcaagggtgagtggaggccatgcccccactcctgtctcgcatgggggagaacctggagagcaggagccgcgctgggagggggacagtgtggtgcctccgagacctctcccacatatctggcagctcccgctcacctttctgccaggtcacccggctcccggctggcccctgaatggctgtcgctgccggaatgactgcccgagtccgagaccctgctcaggtcgctgttctgggaggaattctgagagctggggccgctgtccagctcatcccagccccctccggcctgcccaggctgatgcctcacagctggaggaaacaggacagccggtgagatccctggggcttcaggccagccccatgcccacctcccggggccctggaccaggaggcctcgggggctgagtcctgagctgaggatgggtggccaccttggctccagcttcagcaaacaccagccccatgggcatgtgcttccgccgcgggtcccacccctcctgctgtgtgggaggccctgggatttgcctccgtggccgcaaagccccagcggtgacaggaaggagtgacccagaccccaaggggaggagccctcgcctcgatacctcggggacctggaatggccccggggagtaggttccccagggttgggggaccgtggctggctgaaggcatcatggcaggctggtaggtgtcaccccgcggcaggagcctccgggtactgggactctcgggcccggggcgcatggcgctggccaccacctctgcggccttctggatggtggagaggaaggcttcgcctgccgagcctgtacccgaggagagggagatgggacggccgcccagtgcggcccccacccgcgttctctgggagcagggtgcccgcatcggctccctgctcaagcttggagaggtcggggtacatgctgcaggtagggaggcctcctggtgggccccaggccctctggaagctcccagtggactccgctttggcattcccactcccagtgggcctggacaccaaagctcactgcagagttatgcctccgtccctctgtcctctgggggtgaaggtgtcctaaggggcttgggcttggccttggctcagggagggtgtgtccagggctcggggaggggccggcctttcctgtgtgagttccctgtagaagctgccccgacaccaaagtgtcggcaggagccccaggctgtgcgcaggacggcgtgacacagcctaacggtgagcagctacacaccgcccagggcccggcagcagggcacagctgggctgggggctgggtcccagccgcaggcagtggtgccacctgtggctctcctggcgctggtgagcagttgtccactggtactgccccacctcataacagctccacacgggactgcctgagtcacctgcaccacagccaggggcacagccctcggcccctctcagagtgggactcacccctgccacggggcccagccctgacttcttgctcggcctggtttctctcatctgtccataaagcagccctggccacacctgccccacccccacgtcagcagccagagagagacagtggggacagccccaggaagggttgaggccatgtaggggaggggacgggggacagcagctactagatggggcggcatggtccggcccccaccacctcctcatccccacaccctgagatgccagagcccatgcaggccctccccactcacccgtgcggccgtgttccttgctgtagccgaaaccctggagggtgctgtgcggcctggcctgggagcccatgcctgcagagggtcctccgttagcagcaagccggcccccaccctcggccctgcccacggatggcacagacacccaggacactcaaggaggcagaaaccaggtgccagagctggacacggtcccctcagtcacctacctgtggcaggcggggtccccagaggctgggagggagccagcggcaacacggtgtccgagaacagggtgctccccaagtcctacagggggaggcgaaggccctcagtgtcctcacaccagggcctgctgtactcaccctgccacccatatcagctccgttctgtcccccggacacttctcctgagccactcagctggacacaggctctgtgtccaccagcaaggagcagaggcaggggtcccggatgggagaactgcaaaccccccagctgacatcctggccccaatcccacccctctacaggaggaggggcaccccgcagagcgacactgctcctgggctcacctgcgcggccgcgcgaaccttctggtacaagctgttcccgtgcagaggatctgggggccctgcaaaagctgcagaacagaaaaggcaagtcgggggcagggctgagcctggcaccgctgctccctgtggagcacggtgccctgggcccactccagggtggcaagttcctgccaccaaggcccttctgtcacagccaatgggatgccctcctccaggaccctgcagaggccacacctgagcagaccctcagctccccctcacccatgccccacagaggcgagactctctccacagcaaccacctcgtctcccccagggtcggcaacccctggtgcctgagcgggtgtggcctccccgaagcccactctccctgccccaggtgcaccagggacccctcagaggcttccggggcctggagggagaaaccagcgttcttatcacagcctgaaagctccacctagccccacccaaccccagtctcagccgcctcgagctcccctgctctgagagttcctgtcatgatgaactggggcttctttccttaaatcttccggccccagggccccccaagcctacacctggggccgcggcatcctttcagggctcaggctgagagctgtgcctctgagaacccctcgagagcctctgtcacaggcgaatccactcacgcccctcggccgtctacctccaccctggcaggctggtcccgtgattcggagacgatgctcctggctgtccctgggcccagggctggcggccacaagctgagtcaatggctggatgaactgacaccctgaggctgccatcttccctgcaggagcccagggcacccacctgccaccccacgctgcccctgctctgtgacagagcaggagcatcaccatcttggacaagcccctcattctaaagttcaccttaaccaaaaactgcctaaatccatagggcatcagcctaatggctaaggtcagcacgaccatgaaccacaaataacatctccaaccagaaacattccaaactcctccccaaccagagacatgctagccccaagataacccttctccagccgggaagatgccagcttcgagaaaacccacctccaggctgaaaagatgcctgccccaagataaccttccctccttccaaccctgccataaacttctccacacacataaacattccgagcttctgataagccctctcatcctaaaaccaacattcagtctgtaagataaagtgctcctgaccgcaatcggctgggggtgcctctcaggttttaactaaagaaaatctgtctgtaactgccagctgcgttttctttcctctttctgacgctctgcgcgcgtggggcaggccatcctcactgcacacccaccacctggagcagggcgccccgtctctcacgtgtggcatctggcacccactttcctcacagggcctgtcctgacacctcccacagcctgtgtgtcacccagggccagtgtccaggcacggcaggcaacagccatcatccatagctgcctctgcacaggagagactctggtgccgacaagaacccagggtctgaagaagagcctttcccatcctcaggtcctgctgtgccccatccccctacctgctgcagcccccaccccagggcgtgtccccgagaccactgaggccacgacgtacatgcaccaaccacagccacgggagtggcctggagcccggggccctctggcccgctgaatggtgaggataaatggctggtgctgccttggccccaaagctgtgaggagctctgtgaggatggcgagagcacccccgcactgccgtcccctcaggggcatctactgcctaagtcatgtgtcacaactgtctatggcggcccagggcactggcccctgcggaacacctagagctgcatgcccacttgccataaagtgggacaacactggtttcgacaccggttttggggtgagcccagtggatggtacaccctgaggtctccacaagcaagcagtggcacgagacagactcagtctccctccccagaattccccactcaggggctggggtggggtccagacatggtgcgcccagtgaccacctggagccaggcctccctccaccccatggaagatctcaggccaagcccccacaagtcctcattaggcagaggcacatgggactgcccccaagcctgcggggacagctcccccagacccatcttctgcctggacagaccgactggccggggccccgcctctcctgcctcccagctccgccctcccatggcctcactctgtcttgggctccgaggagcagccccagaaggggaacccacagcctgggaaggatgtgtgaacaggcactgagtctgctatgtgtgggcactgggatggagggggaagacccgtggggcacacagagaaacaaactggcacccggggcagcaagcgcagggacagacgcagccaaaggcccagggacgcataggaggcacggaggacccagcggagggagggggcagggcgcgtcaggggaggccgagccggccagctggggtgagggtgggcagcaggtggagaggccagagatgggccaggatcagcaaggcggggctttgatcgggacccggcccaggtgagggctctggctgaagtcttccttctcaaacctggaggatccgccaccctcccccattctccaaagccctggctcttcctgagcgcgtgcgcggcccctgtacctgcagcttcctggatgaaggcagagttgcgtttgaggatgagcaggaagaaggaggagccgtggctgcacagatagagcaggatcttcagcacctggggagtggggcggtcagcagtgctgggcaggccggacacgggacacccagggcagggcccgggggcaccccaagggcacagagctgcctgccaccctgggccgctcgtctgctcctccatcctcaccaccgtgggccgggcctcaggcctgacccttgaccacccaggggctcaccttgagcttcccgtggccggagctgctgtgcaggcggctcaggaggtactccagcaggcactggctgctgcccggagactcgtgggagatttctgcggcacgctcgggttagggaagggcgagatgatgagggctgcgccaggccgcagggagaccaggccatggggcctctcagttcacgctccctggaggcgcctactggaggctctgccatcaggagcacctgggcttctagggtcccctgtgtcatcagtattgcagccttcagaccccacccatgcctggttacaataataaaggagccgtgcatccccctagggacagcagaatccccaggaaccctttgcaccactctgggaccctgccatccgctctttccactacacggggacatcaaggaaggatactagcaatctcttcaaacaggtagcccggacacgggacatcatcatcggacgtccccttcaggagaatcgggagctgaaagggaacaagagcccctaccatgatgaggtgccatttcccacaggggtgaatccgcagccccccaaaggggatggaaacgacccacctctcactgttgacatggccggagagaggactgggaagggatgagaactgtgctactggccacagggaggctgcagcagggtcctctctcaacagtcagggatgaacagcctcggagaagaggcaaatcaatggtggttctccacggaggagctgcgccacttgggttaagaagggacacagcccccagcctccctgcacttaccagcatgtaaggctatttgaaggtacctctcctgtacctacctactgactagcaaagccaaacaaggcccaggcaagccccttttccacacaggggactatgaatcgttccacctccccagaggccggaatggcagagtgacagccgctcagcgtgactagctccatcgctccccgagaaccgactgatgtcgtgtgttttacgttcgcttagcgcagacgtacttatttgtttcatgcttacttactggcacaaagatgtacggtttatagggatgaaaactggaaccacccattcttgcattattcagtatcaggacagaatagagttcaagagtatttaacaggacaagcatgggacccaccgcgtgaggtgccgaagcctttcggtcggaagggccgagatctagtgacaacatacgaaaacgtggacctgaagtgtttcccgaggctgtggacacgcatcactgacactgtttgcccaccacgccctaaggggagctgctgaggtttgcaggtgacagctgacaactgcagaacgcagcacagaacgactatgtcgaaaccttgcactgagagccttgaccaaccctagcgtggcttctggcagcccaaggtcgcgccctgggaccacccagccccctctgaggtccagcccaggaaagctcagggctgacaaaagagggcagtttgctcaggacgacacctgggaactcgccccggcctctacttctcagagggtttactaagaggggcttacaatggtgcgtccttctctgtcccttcgagacgtctgtgttctctgcaacccaggggtgcctctccaggaccggagtcctctgaaacgccaccgtcagggaggacggcgggctgccagcccacctgggcgccagcagcacggacacagcggctccacgtccaccgggtccgccgctccttccctcccgtcggaggccactgaatgctggccgaggcctgttcgttcccccagggtctggctgtgcccatcgcccttgcgctcggcgggtccggcttggaaggcccggcttggaaggccccgggacggcgcggcgggcgggcagctcaggggcgtcggcgcgggcgaaggggccaggagcagctacccggcgcggagacgcaaggtcaatggctccggcccggggcgagtccggggaatgcggcgctcgagaggagccgtgggaccggggcccgggcggaccgccctcactcacccggtgtagaaagctcaggcggtcccgtagcggcggcgcggcagccatgatccaggtcccctcccggtctgccccgcttccgccaggcccgggccctccaatcactgcgcgggtctgggtccgccggccaatccctcacggtagggcgggccctgaggttggcttcgtaaacaattggagcctaggccaatccgaagtcccagagcacagacagactaggacaagagccaattgcgggggctcgaggccaggcaaagcctggccaattaagaagttcaggaaaggttatgggcggaagcgccgacctatcaagctgtttgacaccggaagaggacggacctaagatggcggcctccagggggctgggaatagccgctcatgtcggctaacggagcggtgtggggccgcgtgcgaagccgcctccgcgccttccccgagcggctggccgcctgcggggccgaggtgaggagccgcgggcgggccagtgctgcggggcaggaggagccgcgcggggaggtggctgggagggaggacggtgacggggtcaggggaccccacgacccacgcccgtcctttccgcaggccgcggcgtacggcaggtgcgtgcaggcctccacggccccgggcggccgcctgagtaaggacttctgcgcgcgggagttcgaggccctgcggagctgcttcgccgctgcggtaggtgggcgcgggccccttccccccttcccagcccttcccctccaagagccagcgggccccggctttcctttgctttcccgttggttcaaggtttgagcgcctgccgcgtgctttagacgccggctgacaaaatcaccgagccatcgacgagcccgcgaaacctcggccgtcctgggcttgtccctgcatgtttgtaaagcgggactggcaccaacctcagaaaggatgggagatgtgtgcaaaaaagcgccttgtaaaacgcgtaagctttcgtgttagcactgccgccggggggtgtcatgccaggattgacccaacacaggactcccggaaagtgcccagcaccttccgggtcttcacctccctggcacttgcagcccctgtgcacctgcagtggtggattccttcagcacgtgtcctgcggggaacccccagccaccctcacaactggcacgatagggcttcttgcccgtggggctttaagtcattctgaggctggttccctaagtgtcagccgcaccgggtaccacctcagtgtatctgggtaggccttgatgccagtgctgactctgtttactgggagctgttaatccggagatttggaccagagaaagggtatttgaacaagagttccacggccttcatccctacccggccccagcagccttggatccaggggtggacaactcatcagaagttgcactttttgctgggtgtggtggcgcgtgcctgtaatcctaccgctttgggaggctgaggtgggtggattgcttaggcctagaagtttgagaccagcctgggcaacatatggagaccccgtctctacaaaaaaaaagaaaaaaaaaattagccaggcatggtggtgtagtcccagttacttgggaggctgaggtgggaagatcacttgaacctgggaggtggaggttgcagtgagccgagatcacgctgctgtactccagcctaggcaacaaagtgagactgcatctcaaaaaaaaaaaaagggggggggctcctgctttccctctatgagagcttgagaccaaatgtggcatctcgtgggggctcagaggagggggcagcagtgagttctgtgatagtgtcatgaggcccttgtcccgtggacaagtgacccagagaacctgcccatggggccccaggctccaaccagtcgagcccccaccatatgccagcacccaagttctctgtaaggtatttggtagaacacaacgtgtggtgtggtagcttgcttttgaggcgtatctaacttggaagcaagccattcagacaaaacactttatcttgcaggccaagaagacgctggagggaggctgttaggagggactctgagcttcacacctgtctgctgccatgggtgcagagccctagtcctgatggcccctggtggcacatatcgaatgcctagggcagaaaggaagtgggaatggcgaagatgtgacattcctcggtgttagatcctgttttttcttaacaagttgaggcgtgggtagagcaggaattggttttccagcattgtgtccgtaaacctgagttagaataagatgtaacggaagccacgataaagactcggtcaaatcctgcagcctggggcttactgtgtgcagactgcaacatgtgggtcttggcctctctgagatggaatggggcccagagcctttcccccaaagctggcagggctgggacttggggacaccctgcctcaaggtccccgttttaaaacactctcactaaggtatttaatgtgaatctggtgaagcctgcagaccttgctgtgggtatacagcacacaccaaagacaaggacgtcagcaccacgaggggacactccatggggcagggtcctcgcaggtggctttcctggacacggggcagggcggaggctcttcacaaaagggcctgagtctccgagaggggcctgcgtagagcaccagcagccagtgcccctcctgtgtggggttggtcgccccctcggcagcccaggtacttcaccgatggcgcctgccctctcgttccccctccctatcacatcacttgacctaaaactaaggtgagaagggccacatcctgactctgcccgggcacttgttgatggtgagaccccggagtccatggggcctgagcgccacctgcagggcgtggcggggactgctttgagagcccccctgctccggggtgcagaggctgcactttcctggggctgcagcctgcgcctgcccccaggcccgtgctagcggctgaccccgtgggctgaggtctgttcctccatgtttcctcctccagatgctgccccagaattaacctggtttcccctaagggtctgatctgggtggtgggtctgcaggagccaggccagagtgctggattttgtcccaagggccaggatagtgtcacatcttgggaaccacggaaatccagaccagactcctggggtcaagccaccgcagtccatccctgtgcatgccagactcagatgccctgcgctggcacaaaccacccgacccgcctccccagcgtgcagggccggctgccccccacccctgccttcctccttcttgtgcccagcactcatccatgagcgagcctcagtgtgcagacgtccttttcttagccctgtcacgccctctccgttctctggcagctcattggcagagcttcctgcatcttctccctccaaatccagcctcccatcccacccacagacctgtcttgccagcactccccctcgctgtccttcaccctgtgtgtgaggtggtgacagacctgccacttcctgtggcccagcgtggcccacacctccaaactcagctctcaggcctccggggtacaccctcttttctgccaccccaaatttccttgcaaacctcccacctttgctctgcccttcctccctgagtgactggatttcagcaccacatcgattgacagctcaggaagctgggcgggtgggggggggggaggcgggggggagggggaggggaggttgtgggggttctgctgttttcgcaccgcagggacagtgtggagctctaactgcttcaggtgcccttgggccgtccctgctgccctaacaaagcacctgagactgggtgatttacaaagaacggcctgatttttcacagctctgcaggctgcgaagcccgagatccaggcattggtactggtgtctggggagggcctttgtgccgtgtcctcacactgcagaaggcggaggtgcagcctcttttataaggctcttaatcgtacgagcgaggaaggagccctcggcctagtcacctcttgatactgtcacttaggcaactcctgaattttggaggggacacatcaaaccacagcaaatgccttggctctcaggagatacccaaagttctttgagggctcagctccgctcaatccgtccctgggccagcgtgctgcgcaagtctgttcccgcgcagaagtacacaccggcgacgggacagcgctatccctgctctggaactgagcccccagaggcagactccacaacccagcgacctgcaccaggactgaccagacaggagcagcctgtcgtcagaaagcgcagcctggccccggggcccctctgtaacattctgagaagccccacccaggggtctgcgaggcttctggggaaagaagtttctctttccttccctgaggggctgccacctgggctggggggtgggggtgggaaggaataaggaaccacatgtgcatgggagcaggtgaccctgtctgtggctgggggtgcagggactccggggtgcagcggggtgggcgacagcagaggcacggccgtcatggatgcctctctgtgccggccaagggcagcccgctccagcaacagaaagcggggagggtggaataacctccagagaaggaaaagaaaactgggtcacggtaagatatttggggaaatccagccggaatgaaaatcccactctgagcaatttaacaaatggagttccaatccaaggggaacgtccagaaggagttttaccactgagcagtggttcatttggaactggttttaattgagaatgaaggacagaaatgaccaggactgaacccccttggcggggcacctcccaaatgctgagtggtgcccctggccccacagccccctcccagcctcctcccagccccctcccagcccctggccccgcaaccccctcccagcctcctcccggccccctcccagcccccaaggctcggcaggagtcaccactcagcctccagaagcttccctctagttaatttccagtcttcaggccaggtgcagtggctcaagtctgcaatcctagcactttggtaggctgaggcgggtggatcacaaggtcaggagttcgagaccagcctgaccaacatggtgaaacccagtctctactaaaaatacggaaaaaaaaattagccgggcgtggtggcgggcgcctgtagtcccagctactcgggaggctgaggcaggagaatggcgtgaacccgggaggcggagcttgcagtgagccgagatcacaccactgcactccagcctgggtgacagagcgagactccgtctcaaaagaaaaaaaatttccagtcttcaggctgcccagtgacatccttcaagggaagaaactataataaagagccaaaaggatatcaaaaggtgcaggaagacaccaccagaggctgaggccggccctccatgcagggacccttcgccaacacgggcctcccccagacccaggccctggtcctctgcccttcgtggcagggtttcgtggcagggttggggcgcaagctccccagaggacgagccaaagcagactcggatgctgtggacacagcagcacctcctctctcccgccaggtgagagggctgtggagcgtgtcctggtcacgaggcagcacgcccgtcagcctggccctgggggctggaccacctcctggcaccaggcggctctgcctgctcacagggtctctctggggctgtgctgcgtctagtgtccagtcactgcgacgctcaggtcatggcgccgttccctcatgacctctggcctctgctttacacatctggaatcctgagccggcctcaggctttcctttcagtcactcccccaggaccaacttcactaatcaggttatcagtggtgttttttactttttaaaaaaagccacaattggattttgaaaaacacagacaatggagggctgggccaaccatgaggagtgcaaagggcggcaccggccagtgcccctggacacccggcttgtctggcccctgctccctgtgcttcctggacaccaaacagcatccaccgaggctgggtgaaggcaaaagtgtttattcaagactttctaccacactgtgggaagcatcgataaacagtcataataattatcattctgagtcactgcaagcgtggggttggatgctggctctcacagtagcctgtgttgggaccatgagcagccatgcgcacctccacgcacggccgagctcaacccgaagaccacgcgtgctccctggcaggagcaggaggcctgaccacagacgcagcagctccccagcctgagcctgggagtgcaccagccagctcgcagcggaggccgtttctcctcacaggctggagtgagctcagagtctagaggtcagaggacctcagactaagagctgcaacagaacgacagcaagaacattctggaaacgatgccacagtgaatcttttatactgtcactcacacttggtgagggcctcagacatgaaaccctggggagaggcgagtgtgacctccagagtttggctgggatgcggctgagacagacctgctgctggccgaggagggcagtggctggcgtggccctcatggccagcaggtgctaggactcctctggaggcccaggcgcctgtctaagctgccggctgtggaccacctgcagagctccccccgcagcctggcggagctgggcatccagggcgccacggaggtcgttcacctggacatcaggcagggggttaaggccaatgatgaccccatccctcggggccagctgaccctctgcatgagggccaaggtcccgccgtcgcctccggaggtcggagccagcctgcagtttcaggtcccggttgggcttggcattgtccggcctctggccccccgggacagctcgtttgagccccagctctggctctggcctctgcctgggctcctggacagcagcgtcctccccgcctctcggctgctcgtgggacacaggcacatggtcccccccgcgggcctttctcatctccaggtgaccgccatggtccagccggtggccctgctgtccaccctgctcgccatcagagatgacccgcagttccggctggcgtaacacagcctggggctgtgcagctgctccttccgccccaccgggcaggtccgctgcaaggcccaggtctcggctcacttgcttgggcttcatgcgagggtcccccgtctctgctcctggccctgccacgagccagttggcttccttcagaatgctggtgccagtggctgccacctccttcccaggttttttcctgtcttgggaaccgccagtaacgtcctgactttgcccagggaattcctctgcgaggcgctcctctgggcccccggcttccctggcggggtctggcacgggcacctgctccgggcccttggggagctccttcacagtgccagctgccctgggggcggcatccttctggccatctctcagcttggcctgggctgcccgaggctctgtgtcagggccgccgtcaggagggccagcagggtctctgcccacaggcccctcagagtgctccagggagcgctggttaaggtcctgggatggagcagggcggcccccaggagctctgaggacagggtccaaaggcaggggaggcagattctccaccgtctccctggccttgccttcaggggcctcctggcctctgggcaccgctgccccgggctcttgatgcacctccactgcaaatgaagtcggtcatcaatttagccacagcactgtacacaggctgccagtggaggggctcagaagaaccagcaacaacagcattgggaaccaaaaccagactcacgctcaggtctagaggccaccgagcctcagacccagccgcatgaggacagcaggagaccccctgcctggccccaccccactccatccgccagcccggcctaccctgcctgggtttatcctcctcgtcctcctgcctctgctggtggatctccttgtgctgctcctcgatcaccgccagcagcttctcctgctggtccagcaagcgcttttgctgcacctgctgttctttgatcacctgaagcaggacggcgtggtccagcatctccgccctgccagcttctgggtttggaaagcacacagtcagagtgcccgggctgctcatgcaccgtgctgggccagggacggcgcggcccacagcaaggcaacgcacaggtcacctgcagggagtgtgcccgaacactggccactggtgacacccatcatgactgtgaccgtgaagcccggacagctcagtgatgcacgcaggcctgagggcccgggagaggctgcgccctgactgcccctggaagcccacccgggatggcctctcccgcacagccagccactgtgccgcatcagttctcccactggctgtgccccaggcgcacccggcaggaccccagcaagcctgctcgttgcccatggaagtgagtgtccagagcaacagtcaaaaggaatgtgccagaatgtcagagatggttatctgggctgggtggggttttgtttttgttttttccactttacacattcagttgttctaggacaagcacgtaagaaaataagcctgggcacggcggctcacgcctgtaatcccagcaatttgggaggcggaggcaggcagatcgcttgagcccaggagttagagaccagcctgggaaacatagcaagacccccatctccacaaaaacaaaaaaaacaaaaaaataaaaatgatcagggtatggtgagaggcgtctgtactcccagctactcggggggcagaggccagaggatcatttgagcccaggaggtcgaggctgcagtgagccgtgatcacaccactgcactccagcctgggcaacagagcaagaccctgtctcaaaaaagaaaaaaagaaaagaaaaactgtaagctatgttttgaaaagaatattggtacttctagaaagtttcctccgagatgagaattttaaaaacaaacaaaagctgtcttttttttttttttttttttttttgagacgggagtctcactctgtcacccaggctggagtgcagtggcgcgatctcagctcactgcaagctccgcctcccgggttcacgccattcttctgcctcagcctcccgagtagctgggactacagacgcccgccaccgcgcccggctaatgttttgtatttttagtagagatggggtttcaccgtgttagccaggatggtcttgatctcctgacctcgtgattcgcacacctcagcctcgcaaagtgctgggattacaggcatgagccaccgcacccggccaaaagctgtcttctaaggggagcatgggagctggagcgtcagtgaggcccccgccagccatcctaaccaccgctcctgaacaccatccactgtggaaattctgggcaggtcctgcgtgatggggagccccagtgcaccccgtgttaagagctggtgcctgcagcaagggccagaggacaggcctgcccgggttacggctggcacacacttggtgcaggagcacccggtctgactcgcttcaacactggccagttatttgccgcaagcggctgtgacttatgtcatttttacaagatgttttcaaattattataggaagctttgaaaaatgatgggttagggctgtgaggcataaaagttcaatccaggagcgagaaggatgttttgtgagtggtgagagcaaatatctcagggacggccctgcatgccaggcatagactgacgtgccggcccagcctccccagtggtgacaccatgaccagccagagaagtgcagggtcagcattctcccaggaacgcagccctgggcctcgcccagacccctggatgtgggggacagggctggctccaaggagatcagggccatggggccggccctcaagcagcagcccctgctccctgctagcaccccgggccagacgcctgcctgcagggaaaggccatgacgggcagagcaggtctcccgcacacctcctttcacaggaggaagtgcaggtggcagaccagccacctcggccgtgggccacgtgctcgccctgggtgctgcggggctcaaccacggaatgtcaatggtacaaggacgagatcccatgtgctggtgacacctccccatactccagggcagggttccgaaagagcaggcaccatggcctcacttgctcctcaaaggactagccctgggcctggtgctgggaagaggaggaaagaggagacagaagggaggagggggagggggaggagggagggagaaagaggaggagggagaaggaaggtgggggaagaggaggagggaggaggaggaaggagggaagaggaggaaggagggaagaggaggaaggagggaagaggaggaaggagggaagaggaggaaggagggaagaggaggaggagggagggaagaggagcaggagggagggaagaggaggatgaaggagggagggaagaggagggagaaggagggagggagaaggagggagggaagaggagggaggagggaagaggagggaggagagaagaggagggagaaggagggaggagggaagaggagggaggaaggaagaggaagaggaggaaaaaagagggggaggggggaaggagccatgccacgtccagccagaagccacgtgggacacatgtgaagcaccgtggaggagacaggctgttcctacagccagagcccaccaagaccacggggactgggctgcagaaggcacgaagccacccacctgttgagacccatgcagatctgtcaaggtggcccatgaggcagcagtgcaggcagcgtccccccttggctggtgccctaagcagcctgcactcagacgcttgcagagaccagctgccctctgatgacaggcaaggccacagcagggctgagaaggaccacggcatttgtaacacaagggagcagagtgggcatcgggaccctgcctgaggggctgtggctgagcctgggtgcgtgcgcaggtctggggcctgacacgtgtccccatgcagggctgtccctggggcaggtgtgccaccgaggggctgcgctcaggtctgtggcccgccagacaggctcttgacttcagcacactcctttgggttcgtacctgctactatctttttaatttcagctgctcgtcccgttgagaggcatacggaagaaaggcagaataggaaaccgtgaaaagtctttttcagaaagaagaaaatcaaaagaatcaaacaggttcaggtaacagagcataggaattggaaccaacaaacatggccagactaaaaccggagacaaaaccccacatgcccgaactcctgaagtggctcagagctccgggagcccagggggcgccttttggctctgccttccgcgctgcaggtgcaaggagggcgagctgcacctggagaagccaggccgcagcgactgggacgtggctgctgcacctgccctccctcggaccggctgtcctgaggccacagggcaagatgcgcgggcaggaagcgtgtgtcttacgaacatcctgggaggtgcccgtgccagggctggcccggagctcccacacctgctcccaggggcttggcacaggaggctggagcggctgtgccctgcgacccccacacagatccctggaacagaccctctcaatgctgaggcacacgtggaccccgcatggggcagggttgaccatcttgagagaaggcttggacactgccaccaaatgcacgtgacttttggtgagcgggggcccagccacacaccctcagagggcgggtggacccctagcctgggagaggacatggcacagaagcctgtccccagcaggctcacagacggggctgctgctacccaactgcatgaggccacaaggaggggtcgcaaaaagccaacagctgagacccaaggggcgagaagtttggaggaggattcagagcaagttttattctcaggagagcaaaggcgtaaggagctttcctggagggacaggtgacagatccctgtagatgaacacagccgagctccgaggcccgagggtgtgggagcagtgctctgggccagggctatgctaggaccagggcgggcacagccacccccaaactgggtccccttggggcacagccttaaaataaacctccacatctgggtgcaggcacgcccacacctggctggctttaaatactccgagtgttaaaactgttaacaaacctgctttaaagacgaaatggtaatcacaagccaagtgacaatgccgcaggtgttttaaaggggagcaagggagataaaacggtaatcacaagccatgtgacgatgccgcaggtgtttaaaggggagtaaggcagataaaaggttcccagaaagcaagctgctgatgggaagggagcagaaagctctccgaggggtctgctcagcaggcggctggaaagagaaggggggcctggcagggctcccgaggatgacctgggcatcaccccagggctgggggagggggctgccgctccctgggcctgaggcaggcggctgtagggcggaggccttaccctccagctggctggccgcctggtttccacccgctcgctccacgtccctctgctcgcgaggctcgggcggcagcccaggccctggagccggcttctccgctgggaggggaggcttcccacctgcacacacggtgaagactcagaaggttttgcaggaaagtcaagggagggtttggggggttgggggacagaaggcaagggcgggacaaaaggaagtggcagatgtttctaaagtgacacccccgtcagcacagtttatattcaacctgatgattactagcgaagcaataaaaaaatatttaacaacctcataggcttgtggcaatgagccaatggtaactgccttcgcaattaaaatgcaagaactgtcctaagcagctcttagacgggcacttaacaacgtgttacctgtcaggcgccccccgcgccgccccccgtgtgcgcccagacacacgagcacagcgcggcacctgacatttagtggtctggcaaacaactgtgtgacagatattacagtagctgtcagccaccagcctcttcctgtccccaccagctgccggggcccgctccatttgcatgctaatctggtgcagggagagagactggggactgagggaggaaccatcgattctgctgcccctgcccagcctccccagcccaagaggggagtgtcttccgacacgagcccaggctgacacccaccgtggtcgctgtcctctgcgggctgccctgtgtccccggcggcgttgcctggcggcggtccccccttggccttttcccctccacccaccgccaggccgttctgctgctcagacagcactgcctggggccgaggatgcaggcccctgtctcctggccccaggtcctcctttgcaggctggacagctggctgaccatctgcttctggaactttctggggatcttcaggaagatcacccgcctcctccaaggcctgggcctgtccaggcctcttcccaacctctccctgctccggctcttgtttctctctttctgagtcgggcagaggcggcgccatctggccctggacccctggagcctttccgcccgcgtgtctggatggaggtttgttctcttctggcacctctcggtcttggccttcatctaccaccaccttgtcgtgaggaacaggaggctcgtggcggtgggcctcgcccacaggcacagcaatccctgcaagggcacgggggacagatggggtcaggctgaggcccctccttcccttcccagggaattagaactgggttcttccctgggttctggctcccaacagtgtgacacaggccaacagataccacctcccctgccggcctccctgctgcctggccaagcacagctgatgctaaagttcaacaggggcagctgcaaacaagttgctctgggaggggcaggacattcatctgaattgaaagacagagaaaacaaaaaggaccagaacttaggctgggctgaagggaaaaagatacacacagccctgagagccaccccgcagggtgtccagcctgcaaaggaggacccggggccgcccttccccatccgcacccccagccagtgcccagcaccttgcccagggcgatcgagctgtgcctcctccggtgcctccttgccatcttcccgtccaggcacatccacgggccccttgatctgggcctgctccagctcctctctctccttcggcagcttcggcttctcccggccatcctcagccacggccacaaccggatcctgggctgggagcagggcacagttagggaactgcactgccaagcagctccaggagcggggcagctctccctggactgttaccatattttccagccaaatggcagagtcaaagcagtttctttttcctgttcgatcattagcagctaagtagcacagaaaactgtcatttttcatgtgtattcacaacaaaaatatgtcaaaatgcgatttacacctaactgggggcagggagaactagactccatgtaatactcagtcattaccaccagatggcggcacgagcccaccgacccactctcccacagtcccctccattaccatcacctccatcatcaccgtcatcaccgtcacctccaccaccaccaccaccatcaccgctatcatcaccatcatctccatccctaccaccatcaacatcaccatcatcaccatcatctccatccctaccaccaacatcaccatcatcaccatcaccatcaccatcatcaccatctccatccctaccaccatcaccatcatcatcaccgtcaccatcatcaccatctccatccctaccaccatcaccatcatcatcaccgtcaccatcatcaccatcaccgctatcatcaccaccatctccatccctaccaccatcaccatcatcatcaccatcaccactaccatcaccaccatcactgccaaccctaccatcattgccatcacctccattatcgtcatcaccaccaccatctccatccccaccaccatcgctgcatcattgccaccacctccataatcatcacctacatcaccgtcacctccaccgtcactgccatcacctccatcatcgtcgtcacctccgtcaccaccaccaccaccgccatcaccacctccctgtcccagcaaggccatatgtccactgagacaggcgctgcagccgagggggactcaggtgaagctgtctgaggaagaattcacacagagtccagttcagagcagcagatggggcctcaccagctcccataggagaagaaaatggggacaattagcttagctttctaccagccttctaagagcagcctgatatgttagtctagggaaacagacagttacactgttgtcagtttggagttgagagtcctagacaaactgtagagggaaggtaccaccctactgggtaataaactagttaacagaaagcagacgctaggctctacagtttagttaaagtaacaaattcaacttttttttaagatggactcctgctgtgtcgcccaggctggagtgcagtggcacaatttcggctcactgcaacctctgcctcccaggttcaagcaattttcatgcctcagcctcctgtagctggaattacaggaacctgccacaatgcctggctgatttttgtatctttagtagagacagggtttcaccacgttggccaggctggtctcaaactcctgacctcaagtgatccacccgcctcattctcccaaagtgctgggattacatgcgtgagccaccgcgcctggcccaagtgaccaattctataagcgtatggccacccgcctgagcaggtgaaaacatactggtctccatcacacgattaggcttcggcagaggccccatgcggaaacaagccataactgtcaatcaagagggcctgtccaatggattactaagtgaagaaagggaggctggggaggggaagggaaaatatagcaaaacaaaggaaatctccgttgtcataggacaagttgcctcagagcagtcattttctcagcaggagcaaaattcagttcctcaggccgtgaatgaccagtctggggctccagggggagctctgtgtgggtgcaggagccgcgggacgggaagtgagcacggtgagccgggagctgccccagaggtccctttggagaacctcccgggaacgccacgcctctcagcgttctgcaagtgttgctggattgcacgggcacctgcaggaaggctgtgcgagtgtcctggctccccgccgcctgcagcagctgaccagccaagggctgcactcacagccttcatgcccggcgctctgcagctgtctgcgggcaatgcacacagccttctccacaacggagcccatctttgcgtcagggacagtttgccggcagtgcctcttggctgcagtaaaactaacacaaaacttcaaaatcagcaactgaaaaacgtccgagtgctgccagccgcttccactctcaacatgaacacaggttgcgcaaagacagaaaggggccctgtatggggagtgcccccgccagctcacgactgagctcctcgggagggaggagatctctggcatccgaatttcttctcctagaaggccagcaacacacccggctaagccacagtagaggcggccacggccaagggggatggctccacgcacgcccccaggaacacccagcagagggtgctgccgcagggcaaccatcctccctcatttggcttcaaaaatcgcctccaggccaggcatgatggctcactccggtaatcccagcactttgagaggccgaggcaggaggatcacttgaggtcaggagttcaacaccatcctggcaaaaccctgtctcaacaaaaatacaaaattagccgggtgtggtgccgcgcctgtattctcggctactcagaggctgaggtgggagaattgcttgaacttgggaggtggaggctgtagtgagccaatatcgtgccactgcactccagcctgggcgacagagcgagactccatctcaaaaaaaaaatcatctccagtcacaagaaaccacgacccgtgaccatcattggcacgtggtgccaggaatgctgtgtttatgctgtcccagcggctcctcactgccaggtgctgacgcaggttcccagctcctggcacccacaaaaacacacaccttcctaacaagtgacagaggccacaactcagccacggcggaggcggatccctcagactttcctccctgctgtctagtcgggcatggaggccccaaggctgccaaggccacagctcagggctcggtctttggagtcagacatgctcggggacttggaggtggtgacctggaggggaaggggcaacatctaatgcatccccaaccccacattcaaggctggcgtccaccccagaccggaggccagcacggacgggcggggaggccagcgacgctgccgtccggaccccaagagtcggcaaggtggctctgcgggctgccggcttggacccgccatggctccctctgtgcactttgtgatcagtaaaggtggagacagtcacatcagacggcccccagacgaagtgacttttaaacacactcccggcatcccacggacggagtgcctcatccactcaagtgccgccccaagttcaggaggaggctcgggatcccagggcgccacactcgcaagaggtgagaacaatggccgctgacgtgacttcaaagctagtccctgcttttaggcaacttttctaagagctgatttctgactttcccttgatgctgccatgagaaagtattactcatgaagggcttggctttacagcccaatcttgagcacacagctgaccaatgacctcatggtctgatctttgcgaatgtgagggggaatcccaggctatctggctcctggtacccgggtgtctgggctggcaacacagccaggccctggtacagcctccggcaggcggaacctcctcaccactgcttttgcctccgccgtggctggcaccactgctgtctcctgggaggcgggagaggctcccagttccttccacagagcaccgaatggtccgtgagaaacagggccacatgcttctcccttctctcctctgactgtggggacaacgccaccctgctggagctctcctgcatgccctactgagaaagttttctttttaagagacagggtcccactctgtcacccaggccggagtgcagtggtgccatctcggctcactgcagccctgaccttccaggctcaagcgatcctcccacctcagcatccagccaccatacccagctaatttctgtatttttagtagagacagggtttcaccatgttggctgggctggtctcaaactcctgacctcaggtgatcctcctgccctggcctcccacagtgctgagattccaggtgtgagctgctgtaccggcccggagaaggcttctgatagctcctttgctgtgtcccccgcgcctctcctcctcttataattttgtgtcatgtttctgttgctgtcctgagatggcagggagctgattccattgtctgagatcaccccgccatccgtgcaggacctggccgaattccgaagggccctgcctcctgcagcctctggcctgtgttgagccacgtgacctgcctccacgcatgggggctgtgtgtccccgcttgggcctgagcacacagaactgtggccatctctgcccccgcaccaacacacacgacccgtcgacacccagcagaccctccttctgtcccacatcaccgcattctgggtcccttctcagccaggcccctgcctcattttcccacggagcggaagtgcagctgtgcctgccccgctgggggagcggggacgagggtgcccgaggggtgcgggccctgctgtgctgccccatgcagcaagggaggggcgtgcaggcaccgggaggacaggggacctgcagctccaagaaaggaacagatgtcacaaaacccgaacccagccctagccttcagggtgctagagagagcaggtacgaacggcccgactcccagctttcaaggtaactgtcttcatgagcctttgcagggactcagccatgctcacaaaggcctgtgaagccgtgcatggggccccggctgtgcgcgtctaaccacgacacatgacatctgcatgaggatgggattcacggccacagcccagggccacgcaggactctcacccagtcagcaggtaccatctttggcctctgcagcatcaaagagaccaataaaactccgctcagcagtctgacagggagcgcacatcggtgcaggaccctcgaccccagctcagcctcagcccggcagcccatctatcacgggggagccgggggctggaaaatcagagacacgctaaaaacaagcagcatgtggttctgagaggggccatgtgttttgttacagcctcgtggaagaaacagaaaccagatgtggcctcggagggcaccaggtgagccggaggcccacggcccgcacaagcctcatgacgggatacagctgcttgcaccggccgcaggcagaggcggcgcagtgctaaggggacggggagcctcctgctggctggcaccgagaagtccactccccggcagcctgctggacgagggcgacacccctcactgcccagggctagggtctcagcacactggactctagctcccaggctaccacaatcccaccgacagctcccatgtcagcgcccagtctagcccagaggcctggacagcagtaagtggccctgctcaggcaggaccgagcctggggcaccagctgaggtgggagcaaaacacccacctccctctccaggtggacgtttttccagtccgaattaccaaatccaacgcaaggcagctccaccggctgcttcggaacactcccagtttccttctctggtgacccctactgtccccaagcacagccccgccagctgcacggaacccagaaggcagggctcccctgcccaccttcgccatccgggaacagtcatccttggcaaatatgagcacagcggatccaggaagaccctcggagagtgtccctcggggcagtttgtatgaggtgacaacgctgggaaggagctttccaggcacaggagtgcggagctcagaacagagatgacaacaagccccagggtcacggctgagatggcgtccccacgcactcagccgacgccaggggctcccttcaacggacctctcctcctgtctgttacagaagtggaggcccctcctggaggcggaagtcactggccagcacctccatagccgcctgagacccccagccagagccggcactgctcactggggctcctcgggtggtgggcagatgacgcccagcgaatctgactgagccggggcctctgcagaggggtgtgttggatatggtcggcacacgggcagtgtggatgcataaacccagctgtcgtcagaggcagaagaccccagcgtgaaggtcatcgtggacagcacctacctgcccatccctgcctggtgccactcagagctcgtgggagggctggcctggggaggtctgctgcctgcagggccgccttgtgtggcactccctctctaggcctgggagggtcagggaggcagtagccacccaggccacggagctgcggctgcacctggaaagccacactcaggaaacacgcatctctgcaccccgggctgtgccacagacggaggcgtcagggttatggggcgctgcggccgggactctgccacagacggagggtcgaggttacagggcgccacggggcccctcctgaagcggcctgcagctagctgcctgagggctcatggtcctaactccacccacggtcctggtgaacaaataataaataacctgaagcagcaaaccaaactgaggcctgatcgccgaccctgtccaggagaaaactggagaaacttacatcctcaaatgaataacagcacgtgagcaacactcagaaacgtacaccccacctagcccaccgagtggcaggcatccaggccagcggccactcctgtcccatgttccctgcatacaggtggccactcctgtcccatgttccctgcacacaggcagccatgccacagccagccatggtgcacagagcatgttcacaggggaggctggtggccccaccctgctggctgcacccacacaggacagaggccactgagcaggtaagcacaatcctcggaccagacccaggagacacccagtgggcacttgccctgagaaggctcagagagccagggtgggcatacctgagagccgcgctgcctccaccttcatcaaaccctcggcctctccaagccggccgccaggggcttcctctgccaagtcctcggggacctcctcgctcacagacagtgtggtgacagtgctcaccaccaggacgcccaggccgacccacagcaccacctgaggagacaaagaccccaggggcgggagtcacagctggcccccgcccctgcccagggtataaaactggcctggcagagaggctcagggacggggtgaggcacgaggagagtggacatgacaaagtcccccgaggacgggacaggcgtgcagtcggccctgcctgaggacaggtgtccactcccagggagacgggcccacctgcccgcgaagctcccgaccactgggagagggctgagccctgatgcgccgctgccagagcatggcaggactcctggcatccagcctgtggctgacgtgccctccatgccagctggggtcatgggccaatcctgtcagagctatgccagccattcaggacggagcgggagggacagcggcttccagaagctgaaggtacgtgacgagccttaggggagcagaggctgagcactgcccaacctgcctgggagaggaacaggaacctccaggcagacttgagcgtccccgtccatgctgtccgcaaagcgagtgctcctgcacaacccgcaaggctggccccgtgcagcagacgcaggcccgtgcgcatgaagggcttgccccaaagtcatcacagctggcaccatgcatgggcacgggggacagaaatggccttcgcctctccttagctgtggtgtggtgcccactggggtcaccctgtgagctgacctccaggcactctttgccgaaggctctccctgtgtgacctagtcctccctccttcccccgctccccggccaatcgtaagcatcacacgtgccgcctcggtgactctgacaaactgtacactgcttggcccggctcctgccaccccggctcccgccaccccggctcctgccacccctgctatgttagcgaacacactgggcccactcctccccagtcattcacggggccacggcagcgggtgctggtttctgcctggcctggcccagcacaagctgctctccccagggaagcgctaactcccggttgggcagagcctgtgtgcactggcaaggcggacttctgtagagccaaggggctgtgccattccctctgtggtctcagagccagaactcaaaatccttttctgaaaggtatgtcgattcttaaagaaaatcagttcagaagaactggtgagacctccctggtccaatacaattagagaagaggtctccccagagggaaggactcgtgctctccgaagctggtggcagctgaaaaagacaacctagtggagagcccgcttcctctacttccttctctgccacccggaaacattgggctggtgtcggcatctccggacgccaggtgctgctgaggctctggggtcagtgggctccgccgaagggagcccggccgcaatgtgcctcggggcttgtaggatgcccagggagcccaaagcccctctggcagtaaccacagctggccggagcaagcggtgacggcaggcctgccccaggtgcacacggggacactgtctgatgtacgttccggaggtccggacggggcctgcaggctcgacggcccacagagctctgccccgccctggccccgaatgttctcctccatttgtagatgccccttcagccatgttacatcttccttgcagtgaagggaagagtcccagggcagtggtggtgtctggaaggtgaccaaagcagtcttaagataataaaaagaggaagaaaccggaactctcgcgaggctgcccgatctgtgtagggagcaggtgtggaacggcccgcccagtcagtgggtggtgtggatggccgtggcttagaggcctgaggccggaaggaaaggccttgcctcttacagcccttgtgacccctcctacgccagagctgccccgggacctccatcttcaaggccctgccctcccatcgaggcctctgccagccagcacagggcagagaccaggctcgggctacctggggtaaagggtccggatggaaattcaacccgacccaccaggaagctgcctggacaggagactgtgttgtctggaagccctgggaagctcctctcagtgtgggaatcctgccccgcaaggcagcataccctcgcctcgtcccgggtggatttctctaactgggcgtgtgctaagtgcatctcacatttctccagctgagggtggacagaaatgaccttgcagagaagctacaaaaaaaaatttatctccctacttggacttcccataacaccaacacgctaattacgggatcttggtgagagtacctaaatgggaagggaaagcacctttgccaccggctggtcaggacaggagactccccaggtgggaatcccaggagcccagagtttgccatccgccagggagcacagcaagacccggcccctccaggcctcaaacgctttagacccaaagataaagacattggttggtcattttatgtcaggttatttttaacggggacctcatctaaaacatccatggagactgatgggccaaagaaacatctccatgactataatgatttatttcaacccccaactttctgagcttaaaaatcacatgcaaaatcaaaaccatgaactcactccatgctgggagacagcaagctttccaggaagacccaggaccgacgagccttggaaaggacacaagcgcagggaggagaacacgctcgaccgaggccctgcagagcgccctgagtgcgaagctgatcggcaggggaggggggctcccgaacggctgcacagggacccccaccacctgccacctcccagggcagtacctggggaccgaactcagccccaagtccaagaacatctcgaaacacactgtggagaagtggaggcttgaggtcaccgtacacagggagcctgcatggaatctttgggctgggacaagggcgggacaattccagacacgcgggtccaggaagcagacccaaccccgcccgctgccacgtacacacctgctgccacctcctaccccaaggcgtccccatcaggagagccatccctgggcccccacaatgcaccagacagcacattactgccggcgaaacgccactcgggacaagcccccggcgtgagggcagcagagtagccctgaacactgagatggtgacgccccgggcgcacccctgccggctggaaggctccatcccctctttgctgagacccctcgtcctggctcgctgactttcaggctgtcaggctctgcggggcacttgccggtgaccactgccttgagcacaagcagccgctggcccggccgacaatgccacagtccacatgcccaggctttcctttaagacacaccctggcagagacaccagcactgcccagcttgaggggacccgtgggaacgaggaggccgcatgggcacttgtgatagcgccttgggtccatgcctcatccatgagggggcagcgcatgcagtgaccaaatcccagtctgtggctgccacgtgccaggagtgtgtgtgagcacctttcacttctgtgccagagccagggcgggaacacggacccagcagcagcagcgggcactgggcatgtggaagcagcacagcattcactgaagtccccaaggcagctgtgagaactctgccggggactgggccacagacaccacggagtggacgccgcagtccccgaggacagggtgggtgccaggctcccccgtgcttgtcctgccactggagtgtgggaatccaaccacgggacgtgtgacatagacaagggaacggtcagtagttccctcggaatcccgaataagggcgtaagtggagttctgcacagacgggatggccgggaacttggggggcctgtggggagcacagcggctgcccagcctcagtggcgggggaagcccacggagccccagcccagcctccagccctgtacttccagcacagcttcctgcacagcctaagaacttcctttgaggacgcggtcattcaacggaccagcgtgccagacacctggtttcagagcaccccgtgactttcatttcggcagttatcagatcaatacagccgcagaaccggccagcaggaggaatgcaagcccactccagacgtctcacctgagcttggaaaatccaggggcctgaccaggggccgcgcactgcccggatcgtagcaccctcccccggagaagtgatcagggcctccagacacacaaggcgtcgctgactcaaatgcagagagaagcaccaggggcaggggagaaaacactcactttcactccacacatgtagaaagtgcacaagtccacgctctgcacttcagccataaaaagcacagctggaggtgggggctctggctgctctgcaccacgcgcctcgatttgggtctcagggcagcccagctggcatccaggcaccacccagcaaggccccgagcctcagcaggccttgggggtcctctctggttacaagcagatgccccgctggtggctcgtgtctgagagtcgcagtgtgcatttcactgcatcttccaagagcaggggccagctttcaggcctttcagggactgctgccctctgggcgcacccgtgaggcagcctcccgcgccccagggatctgtcctctgagtggccctcaggcaccttctaagccacctgctgctacactccctcatggttccagggcagcaggaccaaagccccagcctcactcaggactggagagaccctcaactttctgactttcaaaataaagaaccaaacagggcgggcgtggtggctcacacctataatcccagcactttgggaggccaaggcgagtggatcacctgaggtcaggagtgttcaagaccagcctggccaacatggtgaaaccgtgtctctaccaaaaatacaaaaaattagccaggtgtggtggcgcacgcctgtaatcccagctactcgggaggctgaggctggacaatcacttgaacccaggaggcggagcttgcagtgagctgagatcacaccactgcaccccagcctgggcgacagagcgagactctgtctcaaaaaataaaaaaagaacaaaacacttggtggcaaatgtatcttttcgattccctcagggccgacctattttcctgtcccctggttgatcttctgaggacgagctggaacattccttctttttcacgtctttctccagcacagccttgattcacctactacacaggtgtccccacttccctgtccaccccagcatatcaccagttgtggctcttcctgaggtccctgggctgggtacaggcaccatatcgctgagagtactcagacaggccaaggcacagatccaggcctgtgcccctccgtgggcgcagccggagcccctgggacagtggccacgccgagatgtggcgccacaggcccagggtacggccttgcggtgctgacatctccgtacctaaggaaacagggcatgctgagcggatggcacacggtggtccgctggccccacgacctactgcggagccgtaggagcgctggggacaggacgcaccagacccaagtcagagggaaaaagaaacctctccgtctcctccacgcacagccaaactgcggtgaatgtgattcagtgcgctttctagcttccaaaagacatggcaaagcaggcacagagagatgcttctttcacccaattctgtgtgtgtctacacatgtctacacaccaagtcaaaagccgacactgggctaacgggtaaacactagaagccatcccagagtcagtgacgcgccagccactcacaccagcagcgccgtggccacaggtgtgtgacgccacacacgggcaagagaggaggaagcgctgcagcaattggaaagagggaggcgacatcatcattagctgcaggtgaaaagccaagagatccagcaggagtacagtaaggtgaacgggcgaaaatgtcacctatgaaatctctaacttccctttacacaaacagccacttagaaaatccagggggagggccggacgcggtggctcacgcctgtaatcccagcactttgggaggccgaggcgggcggatcatgaggtcaggagatcgagaccatcctggctaacatagtgaaaccccgtctctactaaaaatacaaaaaattagccgggcatggttgcaggcacctgtagtcccagctattcaagagactgaggcaggagaatggcgtgaacccaggaggaggggcttgcagtgagcagagatcgtgccactgcactccagcctgggcgacagagtgagactccatctcaaaaaaaaaaaaaagaaaaagaaaaaaaaagaaaatccagcgggaaaagagatcccaggatagcatgcagtgcagccaacagccacctgggaaacagatgggaacgaaggacctacagtgaggtctggataaaccaaatgcagtgccttcctgctgagcaggagagttcgcaaggacatctgcacatcagctacagtgtaaagacggcaattcccaagttaatctatagtttcaataagcccagttagaccaaaaaataaaaagcaggactaattttttgttagagtcagatgggctgattccaacattcatacagaaaataaaacaaagactatgcagaaaatgtattattaacagccaagaggcgagatgagaattaaagtgttccaagagcaacaagtcacaactccgtgagtgttaccagggtgtggcaactaacacgcaactaacatgcaactaacatgcaactaacacagtacggaagggcagaccagccaataaagtaaaacacaggtcccaagttaggcccgaatacatataagaatttaatctacaatagcactaacatttcccatcagtgatggattattcaataaatcatgtctgacgactagggaaccatctagaaataaactgaggatacatactttgtttcttacaccaaaataaaatacaggtagatcaaagatttaaattaaaaaaatgaagtcattaaagtactaaaaaaatgagggaggaattattttaaaataatactggagtggggaaattctaactatggccctccccctccttcttcttttaaaatagtactggagtgtggaaattctaactatgactctttctttccttccttccttcctccctccctcccttctttctttccttctttctcctgctaactcacagaacagatgttttttctaaggaagcccaatggactaaaacatgggacctggcatagcaggacatgtgccatctgatgagcagaggctgaggctctcatgctatcttaagctcctaaaactcaccaagaaacttcctcatcaagctatggcataatagctggtatcaaactggtcttcctatttaaaacaatggtaaaagctgaataaaaacaataaaaacacccaaccaaagacactggtaaacagctctgtcagctcagacttgagaggtccagatcccagaggacagagaaaagcccttagtcacagagaggtcaagcctgttgcccttggagactcatcgatcattgggactaagcagacaagacaagagagcacaacagcctagagcctgggcacactcacagggctgggcaccgagaagcaagaatgagggcgctccagcagccagagctcgagggagagaaggaaacctcggagaaggacgccactccacattctgtgtgcaaaaatctcccccaaagcacttgccagctatcagctatgcagagaggagccagcaagatgatgaacgccaagcagaagatgaacgccaagcagaagattcaccatttgagggtgtcactgcccagctgagaccccagaagggctgtaccctaggaacaaggccaactgaaaacacatttgcctcaatgggacacaggccttctgcctatcccctgtatgatggatgaatgacaatgtcacccagaacttctacgatttctcaaacacaacatctgcaaaataccaggcacactagaaaacaagaccccaggacaaaaaaacaagaagccacaaagaatcaatatcaatacttttttctttttcttcttcttttttttcttttttttttgagacggagtcttttgctctgttgcccaggctggagtgcagtggtgctatctcggctcactgcaacctccacctcccgggttcaagtgattctcctgcctcagcctcccaaagtgctgggattacaggagtgagccaccatgcctggctcaataattactatttgaaacaacaataacaatgtcttgtggagttttaaataagggttgatatcaactgcctagtataatcattagaagaatagaaatgtaccaacaagccaaaaaaagagtaaatatttaaaatgtttgattgatccaaagaaagtaaaagcaaaaacagaaaaaggacatatgagacaaataataggacataagttgaaagttttccctcaaaaatcagttattatattaactgtaaatagtcttaaatactcccattcacagactgaataagaacaagacaaaagtcaactgcatgctgttataagagacataccatgaatataatggactagagaaatcaaaagaaaagggatgaaacaagctatcctgtgcaaatacaaacccaaagcagaactaagttagctacaaagccaactttaaggagaaaagtatttccaatgataaaaaggagtatttaacacgataaaagacaattcaacaaggagatataaccaacttcaatctgtctgctcctaataacatggcttcaaactaaaaagcaaaaagtgatggaactaaaaggaaaaataaacaaatctgcagttacagtaggaattatcatacctttctcacaactcataaacaagatgattaaaaaatccataaggggctgggtgtagtggctcacgtctataatcccagcactttgggaggctgaggcgggtggattatttgaggtcaggatttgagaccagcctgaccaacatggtaaaaccctgtctctactaaaagtacaaaaattagctgggtgtggtggcacacacctggaatcccagctactcaggaggctgaggcaggagaattgcttgaacccaggaggcagaagttgcagtggacctgagccaagatgctgaagaagtggctgacacacgtggacgtgtattctaatgtacactgtaagaatctatttaccgcaacttgaagacaaggcaagatcattccagaatgccggaggacctttggggtgggggtggatgtcagtgaggcatccatagggagctctggggtgccgggatgtcctatgtctgctctggatggtggttccacgtggttcactttgtaaaaacttatcaggttgaggccgggcgcattggctcacacctgtaatcacagcactttgggaggtggaggcgggtggatcacctgaggtcaagagttcaagaccagcgtgaccaacacggagaaaccccgtctcactaaaaatacaaaattagcccggcgtggtggctactcaggaggctgaggcaggagaatcacttgaacctgggaggcggaggttgcagtaagccgagactgcgccactgcaccccagcttgggcaacaagagtgaaactctgtctcaaaagaaaaaaaaaattatcaatatattccagtaagaaaaagctcaacaactccataaaaagtgagcaaagaacacaagcagttcacagaaaaagaaacgcaagtggcttctaaacccatgaaaagacactcaagttcccgccagagaggccaagaatgatgaagcctggaaggtcctgggtgcagggacagaggccttgagcctggctgggagtgacgctgcaggcactttgggtagagccaccacatttacagatgctcacacccctgacacaggattccatttctagaaggcttcctacagacgcgtgctcaaatacgtcgacatgctcatgaacacagatattcatcgcgattctgtctgcaatagcaagactggagaggtgagtccttcggagactgggattatggaatcttcctaccacggaacccatgaaacggctaaaaatagcgaggcagctctgtgcccacggctgtggagcaacctgacctgcacagggttttgagcaaaagcagcaggaagctgtgttacagttaaagaaaaacccacaagcacgcacatctccgtgggagggtcgcaccaggaacaacggtgggtggtggcctcaggggtgggcggctggggaggggactcagaggtggcagcaggtccatgggcaatcaggcatcgcagaaacaccatggggaaagcgcttacgactcagctaagtcggctctcaggaaaacccgatgcacagcttgagcagcttagtgtggccctgctgggcaaagaccgtgcgtcctggtgaacccagggttccccaggctgactggaccaagtcccttttgtgggttttaagtttcttgatagaacccatctgaaaacgctgaaccaggggcttcctcccgcctccacctctccccagcccagacccatcagccctcgtccaggccaccccacgagcagcacgcacctgggaggaaagtgcgttcttgtggattttcttgtagatcagcgccgggcagatgaagcagatgaggcttcccatggtcgctcctgtgaggcccaggatggtctccactaggatggagaagtgacaggaagggatgagtggggaagggctctgggaaggaggggacctgagcttttgccctgcacacgggtgagcaagccagcattgaaggaaatgccgtctaggcgtgagccgggagcagagacgccctctgtgcccagaaagcctgacaaccgcggctgattcctccaacagtgcatttaggccccggggtgaattctctgatggttcatctttaaagagtcagacactagggacctcctgccgaaaccagatgctggctgcgcacggcacggctcctgcgccgcctctcctgcctgctgctccatgagtggccctaggaaggcaggacctatcctagggcaggtgtagaggccagggcctggcgggtgctgccaggctgcagcccctgccaggagcccagacagatcgcctctagggctgttccctggggagagtgcgtgcgagttcccctgtgatgtcatcctctgatgacaacgagctctgtcttgtctgctagggagtgggtgcatttgggtaacataaatatgttcagagccttcaacgcttcccttggtaatgcatcaccaaaatcagaagtcaaaagaatcaacaggacagcatgcgctgttctagaatagttggttctacaaattgagcctgtgtcccggcactgcagtctctctctgcccaggtgtcaatgggtgcctgctgttccatcaagctgacagattttttttttttttttttttttggctggagtgtagtggagcgatctcagctcactgcaagcttcgcctcccaggttcacgccattctcctgcctcagcctcccaagtagctgggactacaggcacccgccaccacgcccggctaatttttttgtatttttagtagagacggggtttcaccgtgttagccaggatggtttcgatctcctgacctcgtgatccgcccgcctcggcctcccaaactgcggggattacaggcgtgagccactgcgcccagcaagctgccagatttttttttttttgagacgaagtttctctcttgttgcccagcctggagtgcaatggcgcaatcttggctcactgcaaactcctcctcccgggttcaagtgattcttttgcctcagcctcccaagtagctaggattacaggcatgcaccatgacgccctgctaattttgtatttttagtagagacggggtttctccacattggtcaggctggtcttgaactcccaacctcaggtgatccacccacctcaacctcccaaagtgctgggattacaggtgtgagccaccgcacctggctcaagttgccagattttatcccctgcctttctctgtgggccagagaaaaactgacaaagtctctagacttttttaagagaccagagaagatggtctctgtgcaggtctcgtaactgtgcaggtcttggttgatgccgaagccccgggtcccactccccggcaacagggcagccctcccgccttaccgttggggataaggatgccaccaaccatggttccaaacaccacagagagggtaagtgctttaaaccggagagggggcatgtagccccctgctgcaaaggtgccatctttttgctgtacaaaagaaaaacaaaaggttttgaaatgactgatttcctccaccactctcctagaaagcaaagcctgaaagggctctgccaggcacaccaggcacatctccacgtgaggccggccgcgcactcacctggcaggtgagcctgaccagcacaatcagatctggctgagcaacttaaacgggaacctgcagcatgccaggaaggcacgagggcttctcaccccaggcacagaccgtacattttacaacttccttttgaaatgtgagtatcgagtccttccgttttcctttttgcttttagagcaataccacgagagttttttaagtgccaggaagtatggagagcaaaacacaggctgcacagcgccgctcctgacaaatgccccaggactctcctggcccacaggtttcagggtgcaggcagaacccccccaaacacacgcacacatggccgtgttatctccagcagatgtgcaacaagcagtgagcaatttcaaagtccaggaagaagaagagagaagggcacgatgaggccctaatttcaagtgcctgttttggccccagtgtgcagccaggactctactgatctgcaccgggatgccagggccattcattccggaggaggcggcagagccaaggacggatggcctcagacgccacctgccccaggacccccagctgtggtctctagtacaggacacaggagccagaccacctggctcaaatccttgctctgccactcaccagccccacctgtgtgtccctaggcaagtgacttctcggtgcctcagtttcctcatctgtcaacagaagcatctcctcatccagccgtggtaaggaccaaataagttaacacacaggacggactggccgtgatgactctccctgggctaggaaacaactgcagaactttctagaactagttttgaagcatgccattttcagaatggacttttacataggatggactgtggaagacggagccagaagttcctatcggcctcagggcggtaatttgtatacaggccatggaggtggggggttaggtccatcacacaagagtcccggtcctagaactttacctatgacatagacccagagaaggggagaggggactttagcacgaagactgtcgtgagatggttagccacgagaggtcaagggtgaaggagcagtgcacccaggcccccgcaacaggtggagaagcaaggaagcagagcccctgcaggcttgtagggaccgtggagaaacgctcacggcacatgggccgaagacaagaaagcaggtggcatggccgcagccgcacctccgggaaaggagcagccacgggcgctgacggaggaaacagccaggtccaccttgggatgaagggggttgcgtaagctttcctacttgagtcacaatacatttaacgccattgtcaattttttaacaagataaaaatgggtcacgtacagaaatacagatgctgctcaggtacaaaacatcaaacactgaaagttggcctggccagatgcgcggagggaccccacggccatatgacgggctctggccttgcctcctcgatcctgcctcacccgtgcccaggtgcctgaactccgcagaagagaggagcaccagcacgtgggggaggcacccagtctttggtgcttggcctctgctgcgaagccagaggcacgtggctggtggaagtctgcaggaggctgtggtgaccgcacacctggccacatggacagtgagccaatgctatcgttcccaaggcccagggagacccaccgcccccaatgtggctgctggactctcccctggattctctgagaccactcaacccgccttggctgaaacagttcaagaggaacgtgtgcctctagccaccaggagttccagctgaagggacataccaggctcacagatctcaggctgcgggacagaagatggatgggccaccgggcagagctcccaaggggaggcaggaggggaacctggacggggcagggctcctccagcactgcagagtggcgtctgcacccccatgctcggagcgcaagacagcacagcgggcctttcatggttcactctgccgcaaggagagaaccaggacagccccacgctcggggcgaaagacagcgcagcgggcctttcatggttcactctgccacaaggagagaaccaggacagccctctggtttcaactcctacagctgaaagtttcttagaaagaactaagtagctgcctggcctacatgtgttacagtgaaaaaacccagcctcactttttatttttctttctcttttagacacagggtctcactttgtagcccaggctggagtatggtggagcggtcatggcccactgcagccttgaactcttggttcaagtgatcctcctgcctcagcctcccgagtcactaggactacaggcatgcgctgccatgcgtggctaatttttgttaattttttgtaaagatggagtcaagtgatgttgcccaggctagtttcaaactcctgggcttaagcaatcctcccacctcgccctcccaaagtgctgggattacaggtgtgagccaccatatccagcctatttttaaaatgtgtttaaagacagggtcttgctctgttgccccagctggagtgtagtgatgcattcacactcagcctcaacctcctggactcacacaacctcgcctcagcctcctgaggagctgggaccacaggcaccaccaatatggcctacatcaaactcagcctctcttatggttcaaaaatctgctatattgttaaaatttttcaaagttacacaaaagtcaagagaactgtgcagtgggccgggcgcggtggctcacgcctgtaatcccagcactttgggaggccgagacgggcggatcacgaggtcaggagatcgagaccatcctggctaacacggtgaaaccccatctctactaaaaatacaaaaattagccgggcatggtggcgcgcgcctgtagtcccagctacacgggaggctgaggcaggagaatggcgtgaacccgggaggcggagcttgcagtgagtcgagatcgcgccactgcactccagcctgggcgacagagcgaaactccgtctcaaaaaaaaagagaactgtgcagtgaacgccatgtgcccatctccagactctggccattatcagctcctgcccatcaatctggttcctctaggctcccccaacttccgccctcccgggactcctctgacgcaaatccccactttcctgctatatctctggttcgggacagctgggggcttatgggaagcgagcctgacctgtgctattacgatccggagagtgccccgagggtcttacctgctgctcacacagcagcgtgctcagggcctgcctgcatggcaggatcatcatggggaagcccacagccactgacatcatgaagcccacacggagcatctccgtcaccaggttggagggaaagtgcatgagcacgttgccggccgtggcctcggtgaagctgacgtagccgaaaaaccccacctgttggagaataagaaatggcaacgtggcagacagacatcctagccgagtggcacctgtcacagtgggcagggcatgggggggacctgtgccctgccccccagaatggccttcaatccacttcataatgaagcttctgcaagagatggccttccaggggcaaggcaccatttcgcctcctccttctaaaaatctctagtttctgtaagaacatgcccatttctttctttttctttctttttttttttttttgagacggggtctccctctgtagaccaggctggagtgcagtggtgcgatcttggcctcggcgtacctctgcctccccggtcctggttcaagcaattctcctgcctcagcctcccgagtagccgggtttacatgcacgtgccaccatgcccagctaatttttgtatttttagtagagacagggtttcaccatgttggccaggctggtcttgaactcctgacctcatgatctgcccacctcggtctcccaaagtgctgggattacaggtgtgagcaacggcgcccggccggaacatgcccatttctacagagaattaacagaggtcttggagagagagtaagagtggctcggataaagggttctgggagcagccctggtgcccagctcctcaggtcaggagagcttcctggcccagggtggacccaggctcacagggctggtcctggaatgatggaagctgatggagctgccccaggtccccgcgcagcctccagacactgggatgggaacagagagaaaaacccagcagcacacagggccagggccatgcctgtggcagtcccacggggcaccacggcacatcatgctggcatgacacaggggcggagagggcgtggcaaggctcttaccatgacgtagaaggtggtgaccacattaagggaggaagcaaatatggagctcatggttttcactgacggctcatccaggctgtcgtaggtgggcagcacctggctgtatagaaacaggccatttcacagcggacctgagagaggcacgccctccccagcggctccacttctaggacctctctgcagcccagtgagagtctctgaccttccttcatgcaacattctctgcacactggaagtcccagcgctgaggccaggacttggtgttgctgaggacaggagcgttgcagcagcccccactcaggacaccccccagagcgtgcaccatgcgaacattccccaaggctacagaacgacaggctgctgctccacgccagggagcgggtgctgagagtcaaagcagccagtttacagggcaagcagccggaggaggctgctcagagaatcgctgtcaagaggagggaaagttaaacaaacacaccctggcctgggcggccggcccatctcggcgcctccatctcggcgcctccgcacaggcatgatcagagtcggcacagacaaggaggcggcctggggcgcgattccccactgcagcctctcacttgtgtgatgagaaaactggcttcggtcccacagcctggtgccaggagtgtggtgctgctaggggtgggagggacccaagccaccagccaggcaaggacatgacagccctgcacaggcagcagacgcatccgagggacctgcacagggacctgggcctctggaaaggggtgggcgagacgacaagggagaggctggggccatggagcatctgtgtgcagccggggagaagggagttgggccaggcacacgccagagcacaggtgagagctgctctgccatggggctgaacgaggactctggagtgggagtccaggggggtgctcctagggtgtccaggtggccatggccatggctgtcccagggcaggggctcaagggcacaaaggaagctaggtgggccgggggagggcgggatgcagaaagccagcagccagtaaatggaccagcacagcggccagcggagccaaatcccaaaccgccttgaagaaagtgaaagaaaacacaggacatcaccagcacagcggccagcggagccaaatcccaaaccgccttgaagaaagtgaaagaaaacacaggacatcctgactttattaaaaagcaaaccaggccaggcacagcggctgacacccaaataccagcactttgggaggccgaggcaggaggatcactggagcccgggaggtcgaggctacagtgagctgtgatcgcatcactgcactccagcttgggtgacacagcaggaccccatctccaaaaaaaagaaaacccagcagactgacaagtgagaaggtcctgccagcagctgctggtgtcccgttgcccaggtcctagcacaccatcccatcaggccgccctcagcatggagtgccatcagcagcagtcaggggaccccgcaggacatgagccttcccctcggcccaggctagaagggagctaagtggccaacgcctgtgcacacagccccaggaggctggcagagaatcaggagaaacacccaagaggtctccacggccctagacccacagctacagaagaaggccatgttgcggcatgaacttcccagtgctaaactgtcctctcgccacagctgagtccacaccagggagtcttggcttgaggggaccagcgttggtgccccatgacacgtgcttacccccagcccccaatacaccctgtggggagtgacccccaaggaagccacggacactgtgggaaggggtgtcccacgcacacggggtggccagggtggaaggccaagccccaggctcctctccaatcctgaccacctaccccagggacccccgggatcatccctggaaagaaacaaggtaggagccacaaaacctcctggccacctgcaaaggagctccacagatgggggacatgctgagcgctggcccatggccccagacggagcatccctggcccgcccaccttgcaaggcagcctctgagcctcagggcctaccagagtcaaatggagccatccacatgcagctcttgggtgtgtgcccctctgccctactgtgaggatggggaccctggtctccagatagaccctgacctccagggcctcctgggctcagtgctgcccggctgcttctctgggcctaggacaaccattctgcataaccaggtatgcatttaccaaaaacggccagatagtgaaggcacaagggagacctggccccagctggcatccaggccaatcacacaggcagggggcgcggcccgccacccaacagggacaggcactctggtgcagtgacgctgtgggagggaagagatgtctctgctctcagaaaacattcctgggttcagaggtggggaggtcagcacggcggccggcacaggggtggggaggtcagcgcagcggccagcacaaggagggatgtccctgctggggagaatgtcaggtgaatccgtgggcctgcacatcctcagggcgggacagaaggaaagctgcacttgttgagccgcacgctccagcgcttcaacccagcacctgactccggaaccagacccgaacgaggtgcaccggctgctacgtggccaccaccaaaaagccccagctgcagatttatttctaaatatgcaaacacgcagacacaaagggcaactggtaactaggtacgtggcggaagaatgcggcttctgtcaccgatcataatgggatattaaacagcaagactggggcgcgttctggtggagatggagctgccaagagagacgctaagtgggaaatgacgatttggatctcgcatgtgggtgtaaacacagcggtatgaacaaatttcatctgtcacattagtttacgattggctcaatgcatgcccactaacgctacaggggccgctctgccagccccccgcatgccgatggtcttttcccgtctgcgccggatttacgcctctcttttcagccggttaccatgttccaaccgggcacgaatcactcgctcttgtcattttggtggagaaggtaatgctgctggaattatggaagagcccgatccacatttacagagccctgcgtgccagagagaaagcaggctcgcgcgcacatgcaggcctccaaatgcatccagcagccgtctgaagtcaatgtttgtgccatttccttttaaatattctcagaacagctaaattctggcgaagcgctcgactctgtgcagtcagatggctgggttgctgctgcatcccccacagccaatgctctgcttgtggggatctggcaaaccagggactctcaccagctagtcccaaacatgtcccaggaatgaagccgatttacctcccgattaaaatataactatctccctcaacctggggcgggaaaggtcatcactgaacaagacatcactctttagcagccagcaaagagcgatcacagtaaacgagaaagagagggtcccgtctcccagcagctcgccctccccgtcacagaactccaccacagaccacagcaggacacttacgactggcaggcgaaggacatgccgaagatggggatgcagcggaagacgccctcccagcggacgtagctgacccgccgcagccactgcccactgaagaggccgtgcttgagagaggagagcacgatctgcagagggagaggggagagagcacggggcaggtcaggacgcaggcgggactcagcatcccggcccacgcgccgctaggaaggagtggcaggagagtgcagctcttcccacccacatcccagccccccaccaccctgtgccgccctgtgccgccttgtgccgccagctggaggcagggagaccccgcgcctttctggattcccaacccctgcctcagagcaccctggttcatcccgcgggcaccagagcagctgctcttgcaagggggctgcttggcgcagacgggaggagaccactgagcatgcatggccccagtttccgtcggttacagaggctggtttcccacgtgggcaggtccctccccatcttgtactgtgttagacatggacattttccaaaagactggcccaccaggacgcggctgtctcaagagtaaagaggtagctgccactgggctggccctcactcggagagctgaggagcactggagaccctggcttcaatgaccacctggcctcgtcctggtgcaaacccgctgtgagacacccaggttccagccactcaggaagggtcatttctgaccttgccagggaacaggaaggtcccaggggctcgggtcctggggctcctatgggcaggggcctggcagagaatggagggtgtgctgggggctctgggtggtatccgtgttctcagtgccaactccacagctggcccctagtccatcctattataaattctcatttagaaaaataatagcggccgggcgtggtggctcatgcctgtaaccccagcactttgggaggctgaggcgggtgggtaacaaggtcaggagttcgagaccagcctggccaagatggtgaaaccccttctctactaaaaataaaaaaaattagccaggtgtggtggcgggcacctgtaatccccgctacttgggaggctgaggcaggagaatcacttgaacccaggagatggaggttgcagtgagccgagattgcgccactgcactccagcctgggcgacaaagtgagactccgtctcaaaaaacaaacaaacaaacaaacaacaatagcttgccaccttgtgtcaaaacactggcaccgtgagccttggtcacaaaccctacataagacatctttgcataaagcaagtggacttggagtttccttcaccttgcctggacgacatgaaaccagcctcagagccacccctgccctgagccccagcctctcctgccagccaaccgcacctgggtccagccagccccgtctgccccatggtgcccagggaccatgagatgaatggcacttcctggtacatcctgctacttccaacacattcccaggaggcagcaggcggccacaccagacctgggcacgagcctgctgtggccacaggaaagaatgggccaggagcagcctttcagcgggtacccacgcgcgctgccgactcaccacgaacatgaacacggtgtagaagaggagggccatggcgctgaaggactggatggaggccatcatgttccgctgcaggctgagcgggagcacgatgcacagcgacacggcgaacagcaggaacatgcggaaggtgccgcccacctgcggggagccggcagggggtcttggccacagcccgtgcctgctcaccaccgggctctctgcactgacagggagtgggagcgccccgagcccgaaagccgacggcatccaggtgaatgacgccggcgggtctgaggctggcacactcgcccgaagccgctctcacagccactgtgccgtgtgcagcctcggacactgggtatttcccctccctggagcccagcccagccccacagcgagaccagccagagcaggacagcagcccccctaacacgggaggcaacacagtggctgtgagtcggactcagctgccctgggcgaggggtgggaaaggtgcagactgccctgtgggcaggacgggcccaaagctctagctacaaaggccactacgaagcacggaaaacggaaggtcgaatggggagacagagtaggggacctagctccctggatgctccttggaactgtctctgacaaggagcgaatctggtacattccactcctggagaggacacccccgcctcagtggcctttgaaagcctttctacgctgttagcaccctaacgtgccgtgatgcctgccctgcccagtgaggggctctgctccccggcagcgagggaaaggtgtgtgggcccgtcaggtgggcctctctgtggtggggggcaagcacggaggaggctaccccaaggtccctgcaagaagtgctgagtccacagcccccagaagctctgggtgaccatggaggccggggatgcctgagggcctggccgcctctgccctccaatgggcagcccgggctggcagagacttgctctgcactgtgcccgggtctgaggctcccccacccgcccctcatctacatggtgtcagactctgcctggcttgcttcctcgcgtgtacctctcacagacgtgacccagcaaagcccccgcactccaccaagcccctagaatgacagcaggctcgacagaagcttctcccgaccagcacccaggtctcggtcctcgggaggatcccacagagggcctcagagcagccgtcagcatctgaacaacccagaaccctgaacacatccttacctgaaacccgaacagccgggcaaagaagttggaccccaagtcgccgatcacgacgtagaaggcgatgcaggtgcccagcatcagcccgatcatgctgcacagggacggggggtacgggaaatgccatcagggcaagctggcacacacctgggctgccgccagggactaccccaaggctgggctgaatgacagatgtgatttcttttttcttttttttttttttgaaacagagtctcactctgtcgcccaggctggagtgcaatggtgagatctcggctcactgcaagctccgcctcccaggttcacgccattctcctgcctcagcctcccgagtagctgggagtagccgagtagccacgcccggctaattgtttgtatttttagtagagacggggttgcaccgtgttagccaggatggtctcgatctcctgacctctgtgatccgcctgcctcagcctcccaaagtgctgggattacaggcgtgagccactgtgcctggccaacagatgtgatttcaaacgcgccccagttcacagggcgcgggcaggttctgtggcgctcgctatgtcacttggcatgcacaccaaacgacactcagcttttctcagcctggtattatactcgcccctctgcggaggctctaaaagttacaaaaatctccatgatgggcctggcacagtggctcacgcctgtaatctcagcactttgggaggccgaggcaggcggatcacctgagatccggagttcaaaaccagcctggccaacacggcaaaaccctgtctctactaaaaatacaaaaattagctgggcctggtggcacgcgcctgtaatctcagctacttcggaggctgaggcaggagaatcgcttaaacctgggaggttgcagtgagccgagatcacagcattgcactccagcctgggtgacagagcaaaactccatctcaaaaaataaaaaaattgaaaaagccccacgatgttagtcaagttaagagaacaatcaactgctttcaaaaaaggctgttcgtttgagtttacaattccctaatttagaagcctagaagtgcaatctcccagcgattttttcatctcataaattttttcatctcatgaaattttatgccaaaggaagaaaaatatgacatttgcaatgtaatgccacctttatgcagcggtgtttgaggggtaggtgaggtgctgaggaatggtgttgagagactacaactgagggaggactgtttaccaggttcttggagttttccatacataaatttttcttacaacactgaagggtacaagtaattggactttcatgtatttagcgactcttcagaaacctaagttacaggtgaatctggggatgaaactgccgctcccaccgggagggtccccagtgtctgggtgcgggggtggggggcaagcgcagcggcagggcggggcttacctggtctccaccagcatcttgcctgccttcccgtaggcgtggaatgctagtgcaaaagaaaaaggaacactcaatccaacagcgtgagaagctcgtccagaacaaaggtactgagccaagctgtcaagggcgatttcacagaaacccacgggcccagattctccggggcatgaggggtatttcaaattctggctgccaggttatttttggatctactgtctgcaaatgaaactacaagaaacaaagacagagcaagggaaggacaggaggcaggttcttctttcactcaatcagattttttaacagacaaagagacaagtccctgcgatgcagtcctcccacccggtgaccactgggggccggctggaaacagcatcccacagcccagcacggccgaaccccgtgctgctggccagagcttgcaggtccccagagggttcagtgccggtcccaggtacccgagcgccacagcctgcaccagagggactctgacggagggctttcattttcaccctttggttgggatttatagaaacaaatggagactcctttcgagcatggtgcttcaggaagggaggggacgagagccctgggcttgtggtgtccacgtggacagctaatgaggagccttgccgatgaggagcatgcgttcccgacggggcggccgaatgcggaaggagccgccattctctccgccctgaccgcgggattctctgcagcagatgagaaacggcgctgactcagcagggtccctcccaggccccgagcggtcatctggtgacccccgcgcttcccccacggcccagccggagaagggcaaagggaagtcccggctccaaggcgcacccagagatgcggtgcatgtggcaggatggcccagccccgtcggcagccccagcttcctgcccctggtttccttcctcccacgggctacaggcctctgatgagctttggaaagcaggaaacacacaggctagtaactatgaatgggtccaaaaaacactccttattactttaaactacttaggaagaagcacagcgttgccaaacgccagagcccgggagcagcaaagaccccacctccagggctcaccctggcctttcctggacctgcctatgggctcgctgaagaagcctggcaccccttgagttcatcccacaacacggaaacccgagccaggccccagaagctgacctgaggctgtggagagtttcaaacactaagaactccaggagccccctcagcagcccacagcccagggccctgctgtcaccaaggaacgccctccacacccctcagtgacggcacagcccggaagcaacaaaacacggcgctccaaacatgaagttgctcctggccataatgtgccttttcattctccaaaaggaagctgagtctctacagcatattccaaacacgagcgcaccttgcccaagaaggttccggaatatgcctgccactggcaagggaaaatgggaggctgtctaggaaatcagggcagcactctcttctggttcccaggacaacgtcctgagagcccaccacgctgagacacggccccacgcgccttcttttccccacctgggccaaaccctcacccgccattcccagtgtcaatccctcggcaacttctcctccccaggttcaaacaccagccccagttggactgaccccactccttcacatcctgcgtggactggcacagagaaagggaggaagaggctgaagcgcccagcaaggtcccggggacccagccctcccccgagtgtggactcccagtgcgggcccagcccctgccaggctggaggtatctgtgagcggcgagctctgagggcgcggcctccatgcagggtgtaccctaccccaggtgcagtcagatctcccccagagccagcacaggagccacagaagcctggaccacccaacgaaaggacgcgggcagcactcctgacaccgctgctcacaaccgagaactcagaggccgcgtgggggccaaacagtccctgctgctgggggaggcggtttctagcccagaccacgcatgccagggttcaggcacaactctcaacagggcagggtctggggctcagaacagcttcatgagaagccgcgacagctgaaggaggctgaatgactgatgtatctgtgtgtcttctgaagaggggatttagaaaagtccatgtccaagcaagacacgcagggcaaggaagcagcaagtgagaaggtgacgaaaacgacaaaaaccacctgcaaccagcaacagcaaataggacagggaaatatacaaacaccaacaaaaaacgacacctctccaggctggcacatggcactggaggacagcggggagggtaaagcgatcagcggccacctccccaggctaaccaacccgaggaaccattacaccgcaaacctatgcctgggtgggggcagatgccattcggaggaaaccacccagccgtcccagggaaagtcagtctgtgtgcgaggacgggacccagcccggcgcctcctgaagactgcagtgtggagctgctgtccactctgcacaagggcctcgcctcagctccaggagagtctcatcttaccctccccagggacgcctctcccagcgcgggtctccccacttctaagacgagccagggcacactgcagctgacgcggagcagctgggcccaggggcctctgtccggagctcacgcagtggaaccaccgtgtttggtgtcaaaggcataacctgagacacacttggtgttttggaatcttttttgtttctggcaggcagaagtggactgcggtcaccccatgcaggtaaaggttggaagctcaggcaggagttccaggcagcacagaagagcacccacccggcaattttcttccagtccttcacatgtagccaaactggtttgacttttcagggactttgaatgaatagacagctggctatcagaaatgggggcctccccagccctgggtcaccggtcttcttccaggacacagccaaggactggagttggggcctctgctacagaaaccctatacagagacctcagtgaggagaaaagggtcgccctgcaggccacagctctgcagacccaggaaggggcccgcccaggcacggtgcctcctggcatccggtaggcatctttcagcccaagttgcattaggccatctcactgtggatcaaacttaacagtgaacttcacttcctcaaataacaacaagaaaagactctgacagcaccattctcatcaggaagggaggagaaggaatacatcccctccggttctgagggccgaaacgaacgcaggactctctgtggcaacatgaaggggactgggaggaagtggaggctgggaggccaggacccacgtgtggaccgtgcaggtgtttttattttgtttggccccctggacccctaaacaccatttcctctcccgccacctcctcactctgccgcgggagctgtgagcccggggggcaggatggccttctgcagggaggacctaacatcccagccgcacactggctggaaggtccagagccttcatcacaaggccagagttttcaccaaaacccacagggccaactcctgagaacacggatgctggaatttcaacacccaggctggatgcccccagaatggaacgtggagccgagaggtgccgagcctgtggcgggcagggagacagcgcgggccacacagcctgtgggcagacgggaaggtgagggatggcgccctcgaagacaaacaacgtagaaaatattccacactgaaatgaagcagaaagcgcagccttctctcctggctgaaacagcattaaagcaagaaagaactaagggaaacaaaactgcaaccaacagcatcaggggaaggacacagccactgggagaggagccactgaactccagcaacagcccaggcctgaggagcttcctccatggaattccgagttggggagaacagcaaggctctctgcaggcagctccgcaggaaggcatctggtgtccaggagagacacagagagagcaggtctgcaccagcacggtgaggacggctgtcttggtctgagtttagaagaggaagcttgtgtggacctgcatgggagcgggcaggagggcatggtgacagggagacctggcgcctcatacccttctgtgtcactccaattttgaagcatgtgattataacaggtttttctttttttttccagacagagtctcactctggcaccaaggctcgagtgcagtggcgtgatctcagctcactgcagcctccacctatcgggttcaagagattctctggcctcagcctcctgagtagctaggattacagatgcctgccaccatgtctggctaattttttgtatttctggtagagatggggtttcaccatgttgtccaggctcgtctcgaactcctgacctcaaataatccgcctgcctcggcctgccaaagtgctgggattacaggcacgagccaccacgcccggcaggttttttttttaactgcatttttttttaatttgatttttaattcttttgagacagggtctcgctctgtcacccaggctggaatacaatggcgtgatcacagctcactgccacctcagactcctaggctcaggtgatcctcccacctcagcctcccaaatagtagctgggacgacaggcacgtgcaaccacacccggctcatttttttgcagcattacattttaaaataaaaaaaaccctgctatccaaggaattcttgaagaatcaagtagagtaaataaataaataaataaatggaataaggcccccgccccaggtccagagccaccttgtggagagggcgcctcacccaggccggcgtaggtcctccgcttgctcaggctggccgacttcaccaagaacatgcacgactggtgcgtcatccatgagcagaagaccaagagcagcgcccccaggacgatgccgcactgcagggtggagacaggaacacatgttcacagcagcaggtgctccccagaggccctcaccccacacacgcggctcatgaggaccctcttcacccccaggccccgctccatcccagtctcctgccgaacgcgacacttcctagcactgaaagggccatttccttgctgtggtggccgcgcgccttgtccagggatgaagctgtatgcgcagagcacaggggtgccatctccttcccagtccccacctcaagtcttcatggacagcggggtgctgccaactaatacccccttgttctctgcacacaccctacatgcaccatctttagccacttaagtccacagctacaagtaatgaacacattctggaagagattaaaaatgccattttccccgttctcataagttaaatagacacttactgtgtgacctggggattaactgcacccctaggtattcacttaccaagaggaatgaaaacgtgttcatgaaaaacctgtatgccaatgtttacagcaggtttatccacaacccaaaaatggaaaaacaacccaaatgtccttcaacaagcgaatggatacaaactgtggtccattcgaataagggaatattagtcagcaggaaaaagggatgactactgacacccaccatgacacggatgggactcaaacgcaccatgctgagcagaggaagctggactctgaatgctacaaacagtgtcattctgtttacaggaaactcagaaaaggcaaacttttaggccagggaacagctcagtgttgccaggggctgggggtgtggagatttggctgatgacaaaggggcacatggggaccctctgggggatgaagctgtgtgttctgtttgactgtggtggttacacagcaagcccatgacctgcaccctaaaaagagtcaatcagccgggcacggtggctcacacctgtaatcccagcactttgggaggccgaggtgggcagatcacgaggtcaggagatcgagaccctcctggccaacatggtgaaatcccatctctactaaaaatacaaaaattagctgagcatggtggtgtgtgcctgtaatcccagctacttgggaggctgaggcaggagaatcacttgaaccagggagtcagaggttgcagttgagccgagattgcgccactgcactccagcctggcgaccgagcaagactccgcctcgagaaaataaaaagagagtgaatcttcctgcatgtccactacctccatcgaggtgacacttaaaacacaaggaccgccacactagtgcgagacgtcagtcacgtgaacctagctggacggtgaggggggcgggggcgctgcactttccagtctgttgttctgtagacttaaaactgctcaaacacataagtccggctgggcacactggctcacaactgtcatcccagcactttgggaggccgaggcaggtggatcatttgaggtcaggagttcgagaccagcctggccaacatggtgagacccccacctctactgaaaacacacacaaaaaattagccaggcttggtggtgggcgcctgtaatcccagttacttaggaggctgaggcaggagacttgcttgaatctgggaggtggaggttgcagtgagctgagattgaaccattgcaccccagcctgggtgacagagtaagactccatctcaaaaaaaaaaaaaaaaagtaagtctattaataccaaaaactcatgagatatcaccaagcactcatcagaatggctccagcggaaaagacacgatacccaatgctaccggggatgcgggccggcatgtgcaccactgcacccacatggcagctccagagcggagcacacgcaccctggggcccggccactccacacaggcacgcacccagcagaaaccaccccctgccaacgcctgtccaactcctcagggcatcacaagagctcccaataggagacaccgtaaatgcctcacaggggtaaactacacacagacacgcatggcggtgcagcggacaccagaacgcaagccagacactcgcactagacacctgcacagcaggacccacccacctcagttcaaaccaggcagcaccaccgtggcacactaggggtcagcagtgtgccccgggtaggccgccacggccacagagtacgctccttaatttgggagctagtcacacgggtttgctcgtcatatgaaaattcatcaacagcacatctaaagaagtgtgtacacatttttgtatgtcaaacttcaatgtttattatatatataatctatatagatctatatctatatctatctagatatagatatagatatatatttttgtttgtttgagacagagtctcactctgttgcccaggctggagtgcagtggcgcgatcttggctcactgcaagctccactcccgggttcaagcgattctcttgcctcagactccctagtagctgggactacaggcgcctgacatcgcgcacagctaatttctgtatttttagtagagatggggttttatcatcttggccaggctggtcttgaactcctgacctcgtgatccaccctcctcagcctccaaaagtgctgggattacaggcgtgagccaacacgcccagctatgtatatatataaatatatcaaaactactaaaacaaaaaaaaaaacactaatccaaagtttttcaatgccaaggctgccaaacactaaacacacacatccccaaatcgcctgctggcgtctccctgcgccccagtccaagaaggctgccgtggaggagacgctgcggccagatcagagcaactgggcctccctctgggcagccctcaggactcagaaggacgtctctagtccttcacttcctgacaggtctgtgcagatgcccggctaatcagcacatgctctggcaggggcctaatgtccaccacatggcaggtggtccaaggctcgagatagctggatcgtctgggccctaagatgtactttcacaggtgtctaaaccagagccccttccacggtggcacttcaccgacaggcatcaaagatgacagcatttggggccaggcacggtggctcacgcctgtaatcctagcactttgggaggccgaggtgggtggatcacctgagatcaggagttcgagaccagcctgaccaacatggggaaaccctgtctctactaaatacaaataaataaataaataaataaataaattagccggcgtggtggcacatgcctgtaatcccagctacttgggaggctgaggcaggagaatcactcgaaccctggaggcagaggttgcagtgagccgagactgcaccactgcactccagcctgggtgacagagcgagactccgtcttgaaaaaacaaagataacagtctttgacttgcaggagaaggaccagctactgctccacatgccagaatgcagttctgctgccaggcaagtcacagtggacactgggacatggagtcagtccagaaacacccagaggtggctggcagaaagctgggattctccacgcccagaccagatgctgcccggggggctctggaggcatgtagccctgtcttcccctgacaggctcaccaaccatatcaggcaaacaactcagacacaacagcctggagggctgcacgggagggtttgaaaattccttgatcaaaaaaaagttgttttttttttagagatggggtactgttgtgttgcccaggctggagtgcagtggtgcaatcatagctcactgtaatctcaaactcctgggctcaagtgatccttctgcctcagcctcccgagcagctgagactacaggtatgcaccaccatgcccagctaacttttaattttttttgtagagacggggtcttactatgttgcccaggctgaaaaaattttttggatatttttattccaaagataatgaatatgaaaaacacagtgtttgctaagctaatctaaaattaaactactggtgccactttgtttcaaaatatacatgttgttttcatttttctacctacttggtaacgtttcagtcagcctttcttttccaaagcactaaatgcttgtttattgtagattaaacagatgacacttagaaatggccattttctttcatgtgttattcaatgctggaatgacgctaaactttttgtatttgagattttttccaactgtggtaacgtctgcacacattagatcaaatgtgcagttttttgtttttgtttttgagacggagtctccctctgtcgcccaggctggagtgcaatggcgtgatctcggctcactgcaaccttcggctcattgaaaccttcgcctcccaggttcaagctattctcctgtctcagcctcccaagtatctgggattacaggcatgtgccaccacccccggctaatttttgtattttcagtagagatggggtttcagcatgttggtcaggcagttctcgaactcctgacctcaggtgatccactcgcctcggcctcccaaagtgctgggattacaggtgtgagccaccaccccctgccaaatgtgcggtttttgtgaaacgcagatcttaggtgtataacctggtggatgtttttaatcaccttgcaaccaaggtccctatctagtgtcgaagcctgggagtggtgagttgtgtgcttctgaagacaggtgcagttgggtcagagtttttaaaaacacgataaaatgtaaaaatacggagtcccaccgttcccttccgattctggaggatcattttgctttgttacactttgcttcggtatcgagtttttgagtgtggggaactttccggcccgggctgacaagggctgccagggccaacgccgtgcgcttctcatccacggattctctacgggaactgcgccgggacccagagggtcgccccgcccgcggccgcctgcacccgcccagcgaagccctgccccggcgggaactttaaccaggacgacccagccagacgccccctctgcgggggaggcgagggcggtgatctccgggcccaccggactcacctgtttgaagcagaagggcatggtgaggacactgacccctacgatgctgttcacgatgttcgtgatcagcccccagttggaggcggcggccgcggtcatagtgagaggtctaggggcccggggcgagaggcctcgggggtcgccgggctgcggccggctttggaagcccagcccgaggccacggtcacaggtcccaacgtccgggacgccggtggggaggggatgggcagcctgaacacgggagcctgagcaggcgcgggcgcgggccccagaggctgcctggaggaggcagcctcgaaggccggctgcgggggcgaggtcaacctccggaccccgccaagccctgcggccgcctcagggccatgcgtccctcgctcggcctcgcgggccgcctgtgaatctccgagcccagacccggaagagccgcagagccagctagggacacctcagcccaactcagctgccgccgcggcgctcacacttccgccttccacgggctccgttgcccggaagtgacggccagggggtagggtttggtgggacgcgagccaatgagaggcgggcccggaggggcgggcggaaactgggccggtgggcacctgagggtctcgcagctgtccggttcgccaagctggtccagccgacctgtgcccggggccccagttcaacgagctggaggacaagggactcgccccgcgaggcctcggtttggatgggcagtcgcgggctggagagaaggggaggcgctgtgccttccggggaggagcgggtttaagggttcctttttgacctttattcccaggaccgattctggggcgagtgcttggcgccagggcacgggggcgggggccctgactgcctcagccgaaaaatagtctgttgtgaggaattagcacctaggaggtaggaatgaaacgctgggcacagagaggctcggccactccgctaaggccacacagctccaaggggaggcggtgccctgccgaactgcgcccagatcagtggcaatgttgaacttcaccttttcacacgaaaagagcaagggacattcctggaggggacaggagaggtggaggcttacatgaacagggaaacccgggagggcttccagaaggaggtggcttctaggctggagcttgaaggacaaatgagaattcctcgggtagaaatggagaccggggagaggagagaacagagaagggtcccgatagatctgtggattcctggcacctagctgctcactctgagtctaatgaatgagcgcgtagaccgaatggctgggaagcagcaagtgattccaggctgctgggggaggacggcggaggaaaggaggccgtgtctgcagcacctgcaggaccaggtgtcttagaacagaggcccgttcctcaggcactggcagtgcagccaccaagtaaggctgtgccccaccttcaggagaacaggaggaaatgcctgggtaaagactaattaaatacgcaggcaaaataacaaatgcctgcgttcttttttttttttttcttcagtcagagtcttgctctgtcgcccaggctgtatatgcagtggtgtgatcttggctcactgcaacctccacctcccaggttcaagctattctcatgcctcagcctcccaagtagctggaattacaggctcccgccaccacacccggctaatttttgtatttttagtagagaccaggtttcaccatggtggccaggcttgcctcaaactcccgacctcaggtgatccgcccacctcggcctcccaaagtgctggtattacaggcatgagccaccgcacccagcccatttacttttatataaatgaaatggcatacacattccataacctcctttttattatgtaattttcatcaaatgttatgcatgcgaggtaggctgggcaatttacatgtatgttttcacaaatagcaaataccatggacccgctattgagctttaagaacaaaatattaccgaagacttagatcctccctttcagttcctccccagttccagcaccttcttcccctcttccctgctatcctgagacatcacaatccagattccatcaattcattacttttctttaaaggtttaccatatatggatatatccctaaacaattatggggaagactatttgtctcttttttttttttttttgagacagagtctcactctgtcacccagtctggagtgcagtggcacaatctcagcttgcttcagcctttccctcctgggctaaagtgatcctcccacttcaggccctcagtagctgaaactacaggtgtgtgccaccatgcccagctaattttcactttttttgtagagatgggattttgtcatgttgtccaggctggtctcaaactcctgggttcaatcgatctgctcacctcggcctcccaaagtgctgggattacaggcgtgagccactgcgcccagctgactctctgtctcttaatattcgtttattccattttccaaattaataggaattggcctgcacgtatgactgcctaggataaaaaatacacttccagccgagcatggcggctcacacctgtaatcccagcactttgagaggccgaggcaggcagatcacgaggtcaggaatttgaggccagcctggcaaacatggtgaaaccccatctctgctaaagatacaaaaaattagccaggcgtggtggcgcgcacctgtaatcccaggttcttgggaggctgagccaggagaatcgcttgaacccgggaggcagaggttgccgtgagccaagagcgtgccattgcactccagcctgggcaacagggcaagactttgtctcaaaaaaataaataaaagactgggcgcggtggcacacgcctgtaatcccagcactttgggaggccaaggtgggtggatcacgaggtcaggagatcgagaccatcctggccaatatggtgaaactctgtctactaaaaatacaaaaattagccgggcgtgatggtgtgtgcctgtaatcccagccactcaggaggctgaggcaggagaatcgcttgaaccagggagtcggaggttgcagtgagccgagatcgcgccacagcactccagcctggcgacagagtgagactccgtctcaaaaaaaaaaaaaaagaatacacttgccagtgtcccttgcaggtagggctggctatgtgaccaagttttggacaataagaagcagaaatgacaggagaaacttctaggtcatttcttaggagggggtctgccgctccttcatcatgctgtttggaacctagacacgatggtaggaagccatctcggacagtgcagacaagggtgataccgtggcagagtggagcaccaagctagaaggatcctggatccctggacaactcatggagccaagccaccatgcccatccacgactacctcctcccagctgctctgggagggagagacaaacctgctccttgcgctcaccatgattttggactctgtttcatgaacccaaagctgtagcctacctagttcagtagtgtattgggatggggcacctttgcattttggactattgtaagaattgaattacatatatgtgctattctgcaactttctttttcactcaactttgtcacacttaaatttctttttttgtcttttttttttcctttttgtggagaacggggtctcactgtattgcccaggcaggtctcgaactcctgggctcaagccgtcttcctgcctctgcctccctgagagctgggattacaggcatgagccaccacacccggccagttcaactttgttcacaagaattgccatcatgttgcatgtgctctgagtctcattcttgctgctctgtggaactccgttacttaaatagcccagatccgcatccattctcctgccgagggcacctgagttgtgtccagtcacttgcctcagagacagtgatccagtgaacagatttgtctcctgaacgtgtgtttgttcaagtctctctagggtaaacacctacaagtggaactgcagagtatgcgtatgcatacctaaatgactttactagatcttgccaaattgctcttcaaagtagctataagagctcttcctggtttacagcaaaggttggcaaactttctattaagagtcagacagtaaatattttttgctttgcgggcctaatggtctctcgcaaatattcagttgtgtcattagtctctcgcagtgccaaatggtctcacaaatattcagttctgccatggcagatcagaagcagccagagacaatatgtaaacaagtgggcatctctgtgttccaataaaactttatttacaaaaacagcagctggcccagtgcggcctcagggcttagcttgtgggcctctgctccaacatttggttattgtcagtttggccagtccggtgaatgaaatggaatctctttgtggctctaatttgttcttattacaaattaggtgaattatttattcatatttttattgtccatttttcttctgtgaaatgcttactcatttttgcttgttttcctatttagccgttctgaggaatttcggtgctcgataataaccaactctgtgtccttcgatgcgggtttgatgtctcctcattgctgtagtttttcattaaacaaattaccacaaactaagcagcttcaacaacacaaattcgttacgcatgggctctggaggtcagaagtccagcacagatcgaggtgtcggcaggctgcctgccttctggaagctccgggagacagctggcttcctgctctttggttgttggctgagtccagccccttagggtcgcaggaccaaggttcctgttttcttgccggctgccccctgaagctgtccccagcttctgaaggccttctgttccctggctcacagcccctttccctaacttccccatggagaggagccagtcctcctgtcccatctccggcccagctgaggaaggttttccaaccctaaggtttcgtgcgattagatggagcccatctggataatctgggatcatctgccatctcaaggtctaaccttaatcacatctgcaaagtcccttttgccaagtgaggtcacattcacgggttccggtatgaggggtgcacaccttagggggccgcaatgctgccggccaccgtcacgctgagattcaggccatgtgtccctgtcacagaagtgaagccttttggacactgcatcccatctgtggtgcacagtggccgtgggacccagggctcttgagtttcctgtcgcctgctgggctaggcttcaccgctgcagccacctcttctgtggacctggtgaatgctttgtggggatgggggtgtcttccacgctgagtatcctgggccttagtgagctttcggtcagcctccagcagtatgggctcagggttcctatcttattctgtgggtcaggacccctgactcactattgagatgctcagggtatcccaggctcggccttgtgggagccctatcggctggcccctgggtccttccgtgtgtccctgatgtgatcccagcattcttgcttcccggctccctgggatgttcttgtgcttttcctgcccaggctgggctcgccatttcccccaggagccctggtttctgggagagggaacctcctgagggagggggagttagcggccgagatctgggtgctgggtgtgcttgtggcgcctgggttccctctggacagagcaagaagagatgttgggggtgtgtgtgtatgatgtgtgtgtggtatgtgtggggtgtgttatgtctatggcgtgtgtgtatgatgtgtctgtggtatgtgtgggatgtgttatgtctgtggtgtgtgtgtatggtgcatgtgtctgtggttgtgtgcgtgtgtgtggcatttgtggggtatgtataatgtgtgtgtgtctatgtatagtgtgtgtggtgtgtatggccgtgtatgattgtgtggtgcgtgtgtgtgtttagtgtgtgtgtggatggtgtgtgtggcgcatgtgtgggtggatggtgtgttgcacgcgtgtgtgcgtgggtggatggtgtgttgcacacgtgtgtggtgcgtgtgtgggtggatggtgtgttacacacgtgtgtggtgggtgtgtggctgcgtggtgtttgcacgtatgtgtggtgcatgtgtgggtggatggtgtgttgcacgcatgtgtgtggtgcatgtgtgggtggatggtgtgttgcacacatgtgtgtggtgcatgtgtgggtggatggtgtgttgcatgcatgtgtgtggtgtgggtggatggtgtgttgcacgcgtgtgtgcgtgggtggatggtgtgttgcacgtgtgtgtggtgcgtgtgtgggtggatggtgtgttggacgcatgtgtgtgtgtttaccacacatccacctctagctctgtaactctgcatctggctacgtgcactgaggctttgcaccaacacctccaaatacctgtagaggtcccggcacggggctcctcctggtgctcccccttcctggtttgtaactccgtcgctcccacctccctcgggctcctgcacccaaccctgggctgcccccaaccgtgcccagcctaaatgctttgggatgaggtgtgagcaggaggaggggaggagaaaggaagcgccgtggccgtcttccagccagcaccttccagcttcaatgcccacacgcgagtgtgatcgccagaactgacgggatatcactgtcccacaggagccgtgcttggcttcctgagcaccaagactatgtcacccaggcatgctacggaacctctctgagccggctccgcggctcccaccgccgacatggctgctgcaagggcagcaactttccattaggtcacaggggatgacagccctgggcaccgtctgggaagagggatggagggctggctcggacctctgcagtctctgggaacctcagtctccaagagcatgggtctgctgcacccgctgcacgtctgtggtgaggctcctcctcctcccacaccgggcacccaagcaccctctgccccacaactcccaccaaagaaatgcggggccccagctgcggtggaatcccctacaagccctggcctgcttcaggaaagaatgcctgggggaggtgggcgggctcaggaacgccgaggtgggcagagcttggcccacggagccgcatggcccaggtgccctcgacagccgaagcctggtttttttgttttggtttttgggtggttttttgtttgtttgtttgtttgtttgttttgagatagagtctctatctgtgtgtcccaggctggagtgcaatggcacgatctcagctcactgcaacctctgccttccgggttcaagcaattctcctgcctcagcctcccgagtagctgggatcacaggcaccagccaccacacccggctaattttgtggggttttttagtagagacggggttcaccatgttggccgggctggtcttgaactcctcacctcaagtgatctgcccaccttggcctcccaaagtgctgggattacaggcatgagccacctcgccggctggaagcctgtttaaccctggtgtctgccgtgcagtttctgggaggtcctgtgtaggggccccagtgaggactggcccccctcctgagcactgcttactgggcagtcctacgctctcccacctgggtctccaacttctaagctgggggcgtgagcaaaggccaggacggcccctcggaatccaaattggggccccagtgggcttggggagctgggggagcctcaggggggcctgggctttcaccaccccagcaggcaggagttaaaagttcacctgggctcgggtgccgaattgtctaggaactctggttcccatctccctttctcagcggactccccacctttagaatcacccagggtggtatcccatggagggaggggagggccctacctggtggcctctcgtccagcccaccctgcctcctgggggtctcttccccgtgtttctataaccccagagccataaaactgacaacaggtccagcaaagagactggattttatttagatccatagcccttcttaacgccacagccggggcacagcctgcggccggggtgccaccatgtcacctgacacagaggaatccaccagcgcccgcccatgtctcatggccacacgggggccatctaggctcccacagagggctgtgttggaggggcagctgaggctccaggaggagggacagactttgcagggggcttcaagctgttcctgaccctgccccggcctggtgctctgggccgggcaggggtgtgctcagagcccatccttggccagagctccagaagccgctgccccagggcttttctcctccatctgacgcatctgctccccggcaccagcctggctcagacaccctccagcccgtgtgtgtgttcccgtggtggctcccatgctaggccaaggcttgggtggggctgaggcccagggtgtgctgagcaggccgggcacccaggcactgcctgtcatgactgaagagggcctggaggaaccatggggggccggtggagtctgtgcggggcggggatgggggtgcctttgaggctttcccggtaggttaccccttgcctccagaggcctctccctggagccaggcagccaaaagacccttgttggaaacaccaccagctgcagccccagctccacagactgacggtccagtcccctggcggccaccactggggtttggggactggggagacggcgcagctgagaatcctgggaggcctggagaccgcaccaccgggccgtgcatcaggatgggggacacctggcaaagcccagctgttctgtgccagccctgagagacctgcagccagctggccaaggtagggggttgagcctcccctccccaggtggctccgggacccaaggagagagcccaggagggccggctccgcccaccctccccctttcctgggaggtggggaacaagaacaaggggctgggttgggccacccacatctgctccccggcaccagcctggctcagacaccctccagcccgtcgctcgctccagatgaggagggccacagggtattttccacgaggaatttagaaatagctgtcggcagagccttggtaggcaggctccctgtacccaggaccctcacacccacgtcccaattgccccaccaagggggcctgtgacttcccaagggacttccccccagggggactccacgccccccttctctctctgcatgccagggtagagttgtggcccccaaaattcacatgttgaagtccaggacctcagaatgggaccttattgggaaataggatcactgctgactatacttagttacgatgaggccgtgttgtgtggtgggccctatcctcgacgacagttgccccacagtagaaagggcagatccagacaccaacatgcacacagggaggacccgtgtggacatgagggcagaggttgggcgaggcggccgcaggccaacagacgccaaggatgatctcagcctgtggaagagggggcggcccaggacagtccgggctcacggcctcagggagccaccccgatgggctctggcctcgggaactgcgaggcagtttctgttgtgtgaagctccccagtctgtggaccttgttcctgcagctcgggaaactcacaccgcacatcctggcgcgcaggccaggccgccgcccgggtttgaggccttgctgctcccttgctgcccccagccacccgcacactctcacggagcccagctcacgacacccatgtagtgtgcgacacttttggagaaccacaggaatgtccttgattaaagcgtgcgcagggagaaacgtggccttgttcccacagatgcccaccagggtccctcacctgctcccccttggcgctggccttggccccttccagcctgccccaccaggcggccgctctggtccaggggcctgggtttggtcccttccttgggcacttgcaggcgctcttcctggcctgtctgccctctgccctccccttttcctggcctgtctgccctctgccgtcccctgcggcatcccccagccccaagggcggtggtcccatggccagacgggattcctgttgggctcccgagctctggaaatgcggccgctgctctgcaaatgtgccttctctgggcccttccgcccttcgagtccatctccctccctggcctccacggtaggtccaggtgagcagggtcccctgtggcccccacagtccccttgtgtcaccaggcaccatctgtcccagcctaattgctggagctgctgacatctgggccggccacagtgccttcgagggcctggttggtctctgaggcacggcatcctgcagctgagggccttccctgacggctgtgccctccaccagccagggcccaggcacagcccctgaggcagggtgtacatccctggaggctgcggttggggaggtggtgggatgagctgccctgtaccatggctgcgtgtgggaaacagcaggaggccgggggagcagtgaacggagctgggcccgcttcagggatctcggcctagggcagggggtagaataagggaacagaaccaaatttgtcagggggtgtgaaagctgcaaagggctggtcggacagggaaaggggttctggaggggagggtttctttgtgtagtgggtggaatggtggcctccaatatgtgatgtccaaccagaatctcagaatctcagaattggagcaagggtctttgcagctgtcatggagaggttatctggagatgaggtcatcccggatcatcccagggggccctaagcccaacgaccctcatccttataagggatggaagaggaggagaaactcacatgagatgaaggcagaggccagagtgatggggccacaggccgaggagcacgggaaccagggggagctggaaaggcggaagggctctgcccagagcctctgggggcagcagggccctgtggacaccttggtttcaggctcccggccctgggagctgtaggaggacacctgtgctgttgtgagcctgccaccctggggtcctccatgtggcagcccaggaccccagtgttctttgttcagtggttctggggtctccgaggtgctgggaagcacaggtgtgggggacctcaagacaggtggggctttcccaaaggagcagaggaggcacctgcagaggggcccagagagcacacccgggttcagcagatggtgtagagggcgcccgggcagaggatgcacgggcaaaggccctgggttgtgcagggcgtttatagacgtgcatggagtcggggagaggagggccggccctgggggccgcctgggcagggctcctgcccgcagaccagacccagacctggccagtccactctgggagagtcagggtcgggggagcaggagggggatccgcaagctagaagggtctcggggctggccaggctgaggccgcgcagcctgtgatgaagggggccgtgaggggctctcttctcctgagagaattctagaaccagtgggtggctcaggccctgagactgggcgtactggggtgtgtccatctgggacccaacatggcagcctcccaggcctcaggagctctctggcctgtgccacgtgtccccagtgccctggtgggctctgtccctacacagcagcttcttgggtagtaggtgggctgcaaagggatatctgagttgggggtcaggggctgcagcgacttgagctcagcccaggtgcatggtgtgaggaagctgtccctctagacggctcggggccctgagctcagtgctccaggcctgcccccacggtccctagagggaggcaggtggacaggacatgcctggacaggacagagcctgggctggcaaacacttggagggggctggggctcccgcctgcctctccccagcaccgtctcagcacaggtgagcagagaaaccagaccctccccctcagcctgttggagggcagaagtgaacacccctgtcccccaaatccctgtcatgcttttttgagccccaggaggggacacggcattgtcctggagccacagcattggtctgactctgactcgcattcgatgatggtggacccgtgggcaggtcacgctcctccctgggcctcaggagccgcccagtgccagagccgggggcacagcatggcaaatgtcattcccagcctgcctggctgcctggcagctctcgagagaagcccacagccccgctcctgtctccctgcttcctttgagtgaggcccggcctggccctctgccgtgttcaggccaccagcaccggctgcacagccagcgcccaccagagttgactcctcgggcctctgagcaccttcccactgcctggagtggccggctgaccagcgtccatgcactgccttccccacccagaggcatctccctgtcattgttgagtgcgcagttcccagctagcaatcacctccccatcctcacgagcaccgggcatggtcctgtgactacaacctgagcaatataagcagaagggctgggccgacttcatggcttgccaaaagaccctccccctccccctcctccttccctttctcttcccccttccccttccccttctcccccttccccttccactcctcttcccctccccctcccccttccccttccccttccctttctccttcccctcccccttcactttccctttctccttccccttcccttcccccttccgtcccccttccccttccccttcctcttcccctcccccttctctgaatcagggtctcactctgtcacccaggctgaggtacagtggtgagatcatacctgggaccacaggtgcacatggctaattcttgtattttttgtagcgacagggttttgccatgttggccaggctggtctcagactcctgggctcaagtgatccaccagcctcggcttcccaaagtgttgggattacaggtgtgagcctccatgcccagccccagctgaaagcttttcagtagtcttttaccttccctcctttctccttcctgctgcctggaatgcagatgcaatggctggagctcctgcggttgctatggaaccatccttgacttctccctttcagtcacacccctcatccaatctatcgggaaattctgttgagtccatgttcagatatccacagcttggaccacttctccccacttcctgtgtctccaccacgatccgggttatctctctccgggatcgtcatgttctcctcacttccgtcctggcctccccatggtctgttcccacccagcagccagagggtgagaccatgtcagcctctgctcaaacccaccctcagcccaggtcctcacaggcaccctgcaggatgcgccctgcctcccctcgggccctcccagcaccccctagctcactgcctggcaaccccactcctgctggtgggcctacaaaagctctgtagcatttgctgaggaacaaatgaaacctggaccccagggatggaggccgtggtgggggggcaccatggagagggggaggcactgtagaggtggggacaccgtggagatggggggggcgccgccccagcccggctgcctgcccaccacccattgagcaagcctctggtatttaagccactgtttgatttagggcccaatgaacgaagccagccaatagcaatctctcactgttaccctctccattttatagatggagaaaccgaggctcagagaggcaacgcagtgtgctcaaggccacaagacttctaggtgtgggcctgggctgcatgcagggtgaaggttatcatgacccccaagctcagggcaccccagggatgcagctctgacccctgccctgaggatgggacactccaaccctttctcttttttttttttttttttgagacggagtcgcactttgttacccaggctggaatgcaatggtgagatctcagctcactgcaacctccgccacctgggttcaagtgattctcctgcttcagcctccggagtagctgggattaccggcatctgccaccacacccagctaatgtttgtatttttagtagagatggggtttcgccatgttgaccaggctggtctccaactcctgacctcaggtgatccgcccgcctcagcctcccaaagtgctgggatgacagacgtgagccaccgcacccggccaaacaccccaactctttctgctgcattgagtccagcagggtgccctgagggactggccccggggacattttcagccactttagggaaaagaagacgtaatgctcacactaaccgccccacacccgactccaggctggcctggcgccataccctcggggtctccaagagaggcagggctggtccccacccaccacctcccctcaccttggtcttggtgtgtggagcccttggccaggtcccaggcagtcgtgggtaacaccgcagacgtgtgttacccagggcggggcccctgagagctggggtggttcagagcccgtccccactccgggagcaacgtcagggcggggcggggctggacggacaatgtgacctttgcaatgtccccgaacaagaactgcagatggtaatcacggccaccaggaggaaacttcctctgaatcttccactaccgtggtgtaactagggagggtgttggagcattcagcgagataaaaagcctgcttttgtctacactttttccgttttctaaaaattccagacacaaggggagagctgcccaaacacagaggtggagaggagcctgtccggacacagggacacaggcagctccggcagtgaccacttgggcctcagagaaactcacaggtggccactactcctgtttggagctggaggcagatcatctggggcgcctcggggtagggaggagctggtggacagcacgccccacttcttccccagcccctccagggggagctgccattccgcagctggtccacccagccccaggaagggggaggctccccaggacagtagcccaaagagcagagggtctccccgagaaggtgcaccccaggcagggcttatccacataccactaggctgggggccctgctccggggggttggggtggctggaaccttagatggtcccatcctgttggggggcttcctgggccgctttgctgctcccaactgtggaaggttctctcttgccttccctttcctgctgttagaagcaccccagcccctccaggcagcccccagggcccgagtgatgaatcactgacttcttgccaggctccggtcgtgatgcggggtggcagagggatgtgggcaacgcagctgggagtcccggggcacagccgggctctctccaggctccccatccagcagctgcgcacccccccaaacacacgccgggctccccgcacccggaagctgcccacaaccggcaggacaggtcggtgggccccggggaggaatgcaggaatgctgcgtgcccaggcgaggggccctgcgcccgcccaaggggctctccagctgcgcaggggccggggcggatggagccggggtaattaaagctggtgacagctgaggagggatagagacaggaacacaggtggggtcccaggcccctccgcttgctccccaggcagagggctggagcggcccccaggagagtgccaccttcgtggggcaggaagagaaggttgcaggggcactgggtgtcagtggacattgaggtctaggagaggccagctctcagctgcaaagggcaggcagagtcaccatgtgccgggcctggccgggccctcccagttcccatccagacacccagacacccagacacccagacactggtctcgtccaggccatcacgtggtcaggaatggtgtctgcctttgataggtgaggacccgggtgctgtaggatctgctgctctaaatgaaggcaggcggtgctgccccagcgggaggacagcagctccaggcctgacaaggctctaggcctcagcttccttatctctcccgagcccaggttgacatccctttcccaccttccacagccagaggactagacaagtgtcttcaccggagcctcgtttcctcatctgaaatatagcgctaaccacccctccctcccgtggctgtggcaataaattaaatgaagcccacagaggacctagcacacagtacgtgcttaatcaatacagaacccctcccccagcactgcccgcccttcccctggaagcagccacgcttacctccaccacctcctctccatggtcatcaaacactcgtgacaggccggcctccccctgctgagaccctgagaggtccaggcctctgctcctcgtctctgccacgcctggtgtcatgagggtgaaacaggcccttgggggacgttcggactggcttcctgtgatggccgccagcattagtagcgttgttactgctgcctggacacacacagacgcctcacagagcaatgcaacatgtgggtgaagttttcagataaaatcggagatttaatagaattcccgcagggtgctgagctccaaacccaggccacacatggcacacgcagggcctgtcagggctggggctgatgaccagggtcaaggggatcccagggccctccagctctcccccagctcctgatgtggaggggagggaactcccgctcacccccagagagaagggagtccacacaccgcatctgagctggcggtgggcagggtacccacctcggtgagcagcctggggtgggcctggggtcaggctgaggtcccggtgacaaaggctggggaggtggatgcagacagcctccactttcaccatggcctccctcctctgaggccaggcctgggatgcttctgccccacagctccggtccacctgccaggcctgtccgtccttggatgagggcagggagaggtggggtggccactggcaagtagagacttcaaaagtgcacggtggcccttccacgccctttgcttcttagcccccaaccctctgccaggctttctccctttttcccacgccccgcacagacaggtatcctgccctcagcatctcacaggggtgagtggcagccaggagcagcagcagatgcctgtggggagatgagacgccctcagctcccaggccccgctcctggggaaaaacagggccccaggaaggtgccccaaccgttcctgggggccccagccccgaacagggggtcttgaaagggaactcttgtgtggtgagtgccccctgagggctgagccacaaggtcaccttgatttctcagcggacggaggctgagctggctagggttccaggctgggtgtgggagggtcaccccaacaggcgatgcccgagaggtgtccgggcctggctttccacgaggaagaaccagtcccctgtgccatctgcagggcttgccacacaatctggggacccggtgcaggaggagaattcctggccacttgtttaggaggcaggaaaagggccgggcgcggtggctcacacctgtaatcccagtgctttgagaggccgaggcgggtgtatcaggagtttgagatcagcctggccaacatggtgaaaccccgtctctactaaaaatacaaaaattaaccgggtgtggtggtgcacttctgtagtcccagctactcgggaggctgaggcaggagaatcgcttgaacctgggagtcggaagttgcagtaagccaagatcgcaccactgcactccagcctgggtgacagagcaagactctgcctcaaaaaacaacaacaaaaacccgcaagttcagaggtaaaatgattaagaatttcaggacagccttagccacaggcccctctgatgccaggccctgggcaactgccctcctcaccacccatgcagccggtccgtttctcggtaaagacttttctagaagtgtcagctatgggtcaaggcttgggagaggggccaagagaagacctagcggatggcaggaagaggcacctgctgagctttgggaagttcccttagggctgatgtgggggcttccctgctgggcggcagaccacatagctgtgcgggttcttcttcagccaagaatcatgcatggctcctgccactgtgtgggacggaaccccgtgaccaggagtggggtctcctggcaggcagcacaccccacgatgccccccaggaagccgagtttgtaactcctcctgttaagggagccctgtggtcagggccaggaccctccctcctcttgaagatgccagcagagccctggcttgcaagaacttgatgtgtgcgtttgcctgaccgggagtcaggcgactggtgtgtcctggacacctgcgaaccaggcagacgcttcttcaccgggagctccggccccggtggggctggggctggggctggggctggcctcccacctgtttggtagcggtagcatcatctcagccagcactcaagtacgtgacaaagtcatgcagagctggcaggggaggcacaggaagaccctgtggtcccgggctaccagaattctgtttgggggatatggggtcgctcctggcagaggtggggggcatgggaagctgagctgttttccctcgaacgtctgctgaaagttttctgaacagttccatacctcgttgtaagatcagagcttgccagctgaaaatgaaggacattcactgtttcaggaggtggccggggtggctgctgaggcctccgacctccctcctgcagaggccacaggctgagtgggtccccacattggccctgtctggccctgtctgcaccggtgatctgaggaccctgccaccgtcaggagagaactctgagtccgagaatctaaagttgacttaagaggtgaaaaacacgatgaggaggaagagatggcagtcacctccctctaatccctgcaccccggccccacagccccttcatcctcaccaccccgcaggctgccagcgagagggaggagggaaccaggtgcagcccccctgcaagaaagccagactgcccccaggcaggcccttcatgtcttcgccttcttatcttcatctcacagaggcagctgggctcagcacagtccccccaaggagaccgaggtggggacccctggggagacgtcctcgggccctgcagcagggtggggggccggagccaggctgtgaacaaagaccaggtaaggagataaatcagctgcccgatcacatttcctgccctgaaagctcctgtaaaacatgagagaaaattgacctgtcaggggaatagatgggcccagatagtggccgcccgccccgggccagcttccctccacccatcccacctgcacagagcgcccctgcccggcctgggcaaccccagagggaacccaggcccggggagaggtggcccccatccaggcctcctgtgggggctctgctcccagcccccaccctttgcatgcccctgacagacgaggcccagctgctcaagcccatcaggctataaaacggatggagaccaggggcggtgtcagcagacagctagagtaccttttaaaaaatgtaatctctttttatttccctcccctgccctccctcctccctccagaccataacctccccgccacccctcccctcttcctgcgcagccctgaccttggtgcacagaccttggtgtggggtggccggaggcttcaaggacgccctcctcaccttgagaagcatcgggctcagccaagctagcctgtgggggcagggagagagggaagcagagctgatgtggacaggctgtaccccccccaaggtgaccccaccacctgcaactcccccagcaccggggtggcctgggagtgccagacggggcccctgcctgaggaacaggatgggaggcctctgcagtcagctcctccacatgacggaggggcacctctggcctcccggggccgcacagagccaggctggcctccagctcaaatgttcctcacccaatcccgccgcagagcctccactctctctcagcccatcttatggctgaggccagggaggtcggcaggctcgggagactacctggtgtcctgttagtggacaccatgcagggcctgggaccccagctctgcctggtccccacgcccaggccctgccagccctacagtagtaccacgttagagccccggcctgcaggggccatgctgtgacggcgggtcctcaagcggagggctcccagctgccgccagtcagaggcatcaggctgcctcagggaagtcccttctccaatgcctctttggccgcacagggagcccctgtgtgtcccccgccccccagggtctctgctggacaagaggctgcagcagccgaccggggccaaatgcatcttcttcatcctccctcaggctcagctgggaaggaaggtgctgagaggaggggaggtggcctctgagctcactcaggcctccccagccacccaacactgcctccaggtcccgtgggctgcccagctggccccaggggacagccgagtccatccactggcacacgccggagtctgaccagtaaccaggcctgaccagccgacccttcccctccatcccctcctgaacaatggctctttcagcacatgggcaagaggccactggccagcaggagcaggcagatgactgacagggccagagggagtgggaaagaggctggagctccagcccaggggtggcgggcagccagggagggcagccacgcgccatccttagggctgggggccgacagagggtccctgagggttgggagagtagggaggacccagggcctggggtggtgacagggcacaggttgaggagcgttgcgcagggcagggttgggttgcacccacgctctccccagcacctggcagctccccgaggctgaggcctctggggccccagagctgcccaggtcttctcggcttcccggcctcagcctcccctcaccctgccctgccctgccccaggcatcactccctctcctgggacctcccagaccttcctctgggctccacacgtggcagggactctcctgccccaggatcctccccaggcgttgcccggagtgaggactgttctaagcagcctcaccatccacctgggagcacaggctggggtccggagcctcccctgagggtctggtgcgggggacagtaagagttgagggtatatccttgtctcttacgtgtgtgtacacatgtacacacacgtactcacatgcacacctcatgcacgtggtcttttcccacctgcccccgtcagtctgctgtcccagaccctcacactggggctaagggtgtgcttggctgcgaggggaagcggggactgtctggcagctgcatgggctctgccagtctggggcgctgtgcgagggatggaggctacaggggctggaggacaggcaagtggcaacgcggagccatagccctgcaggagccggccggagggggtccctctgcctcggctgccttctccgtcctccctcactgctgttcctacagcccctggcagggccggcggcctagggaccctgaagggcaggcccgcaggactggtcttcacactctgcccggggcagccccaccccctgagtcctgtcctgtgcagtcctcttgctgcgttggtgagatgtctcagaaggcagaatggggcagatttgctttcttctgttttgtggtttaagcttcatcatgccagccctggctccctggccctgagccctggaggggccctggctcctgcctcagggtccctccaaccccactgctcagcccaattgtgaactctctgttcgtccatcgccgttgggtttatagtctctggccgctgaccctggccaggtggcccttggcattctgtccaggacacctgtctgagggtcccctccacaccccagcccttcctccacctccactctgcctgaaatccatgatattaactgctcagtcccgtggggcccaggtgcagacttatgtagggcaggcctgggctccccagggcccggctgacggggaaaagcaggttacagtcaccacgcctcagggctgggcacatttatagaagcagccaggagctgctcatggactctgggatttcaaggcctccctggcatgggcagggtgatccgcgcttgaataagtgagtcatgcccagtgtcacttcaaagccccgagttccagggactcactctatgcctgcaaagggtggtatgaagaataggcatcaggccgggcacggtggctcacgcctgtaatcccagcactttgggaggctgaggcaggtggatcacctgaggtcaagagttcgagaccagcctggccaacatggtgaaatcctgtctctactaaaaatacaaaaattagccaggcatggtggtgggcgcctgtagtcccagctacttgggaggcatgagaatggtttgaacccaggaggcggaggttgcagcgagctgaaactgtgctactgcactccagcctgggtgacagagtgagactctgtctcaaaaaaaaagaaaaaaaaaaaggataggcttcagacatacccctaggtagtcccccattctgatgtgttttcatacaactttatttttccatatctccaaaaaattaagttttctaactctaatggaaccaagagaaactcatgaagccagcaaggttaggttcccacatgtggactggcatattcggggccacccgtctgggggtgtggatagagtagggaaccatctggagataaatatgtcatggggacttaggagcttgggaacaaccaagtcccttgctgtccctggctgggccctggtcttgccacacctgggagatcccatggctcctcttcctctcgcccctcaggactggcttgccggagcctgccccctgcacgggccctcgtgggggctccctgcctgcctacgcctgacccccatcccccgagtggagccggacagggctgcctgcagctctgtcttccgaaacacacctctctctcccacaaaataatttaatgcagtttaatgccttgaagttgatgtaaaaattacaggcgtgtgcgggtggggtggggtgggggcctcgtaagaaattcttttgaaaatataattgagttaatggagccataactatgtctcattttgggggtaattggcctgctttttgtcaccctgtccatttacatactcctgttttctttttgctattgattttttctttataaagtgggccactttactgcaatttttaaagccccggtgatgaataaaacctcatcttcccactcattaagacacaagaattagccgggctcagggcccagccagtcaatttgtttaacaatcccaggctggccgtgttttggtggagaccaggggctgcctgccgcaagaggggctagagccgctgccagaaggtggccccaggcgaggggtccccctcaggggaggagtctgccgcctccgcctgccccgggaccttgaccttgggacacccctccctctccccatctccctcccttgctaaaggcttcagcagccttggacccctcggagttggcctcactgcggctgtgatccagaggccccacccacctgcctctcaatgcagatcaaggtcacacttcctatagaaaatttttttttaattataaaatccatgcacacacaaagcaaatgaagccaatggcacaatgagatttaaagcaaaaagtagcaaacccctcccccggcaggctccagagagacgtgtatgaatggctggctccttattcccctcccaggcactgtgcatgcggagaggtccattctacacgcatcaaatcctcacacagttcgaatcctgccatacctgccactcgcaacttggcgttccgtttaatttcatttactgtcacatggacatcgtccatagtagtaccgagacccacacgccatgtttcatgactttgtagtatttctctgcctgtccactctgtagggtatttggagtcaccagctgcctgagggctctaggggattaaagagtttcccagtgccggccgggcatggtggcgggcgcctgtagtcccagctactcgggaggctgaggcaggagaatggcgtgaacccaggaggcggagcttgcagtgagccgagatcgcgccactgcactccagcctgggcgacagagactccgtctcaaaaaaaaaaaagaaaagtttcccacggcctggggttttcagtgctaataccgggatcgccctgggcaaactgggatggctgacagcttatatgtatttgcccagttgtactgttggacatttaggttgcttctaatttttcaacataacaaaatgtcactgcaaagcacacctctgttcatgtagctttgtgaccttatgcaagtatatctggaagataaaattcctagaagaacaaattaccaggtgaaagccacgcagatttcaaattttgattgatgttgccaaatggcccagcaaatgcgtgccaatgtgcacatccctcctgcccagggatgagaacctgcctgtttccctgcatctatggcaaagcaggatattgtaagtcattttgatccttgtcatctgataggtgacaaatagaatgttggattttaattttaatcggctttattgagatatactttattttttaatttttaaatttatttttatttttattttttgacacggagtctcgctctgtcacccaggctggagtgcaatggcataacctcggctcactgcaacttttgcctcccgggttcaagcaattctccctgcctcagcctcctgagtagctgggattacaagtgcctaccaccatgcccagctaatttgttgtatttttagtagagatggggttttgccatgttggccaggctgatctccaactcctgacctcaggtaatccacccaccccaggctccaaaaatgctggatgacaggcgtgagccactgtgcccagccaagatgacactttagatacaagaaaatgcatccattttaagtgtacagttggaagagttttgacgaatgtttacatttgtagaaccaccaccacaatcaaaacacagaacactagctatttgggaggctgagcagggagaatcacttgagaccaggagtttgaggctgcagtgagctgtgatcgcaccattgcactccagcctgggtgacggagcaagatcccacctctaaaaaaaaattaaaaaaaaaaaagacacagaacatacccagcacctcagaaagtcagaaagttcctccaggctccttttcaatctcctactgagtttcagtcccaggcaaccatgggtctactttctgtcactataggttcgttttgccctttctagaatttcatagaaatggagtcaggcagcacactctggcttcattggctcagcactgcgatttgagattcatccgtgccatttcatgtaccgacagttctacctcccagctgccaagcagcccccgcagtctgggtgccccccgtgtggcagcccccgcagtctgggtgcccggcgtgtggcagcccccgcagtctgggtgccccgcgtgtggcagcccccgcagtctgggagccccgcgtgtggcagcccccgcagtctgggtgccccgcgtgtggcagcccccgcagtctgggtgccccgcgtgtggcagcccccgcagtctgggtgccccgcatgtgcaccctcacctgctggtgggcatttggcttgtttcttccagttcataacatagagctgttatgaacacttgtgtatgaggccttgtgtgaatcgtgttttcactttggggtaaacacccaggagtggagtggctgggtcacacggtaggtggatgtttaattttttctctcactgccaaactgccttccaaagtggttgcaccatttacgttcccaccacagtatgagagttccagttcctctacctcctcactagaacccgacagtgtctgccctactgatgttagttacactggaaggggtgcggtggtatctcactgtgattctaatttgcatttccctgatcagtgtgttgtgttttgacgtttgctaagagtgatctcttttggcagggtgcgttggctcacacctgtaattccagctctttgggaggccgaggagggcggatcacctgaggtcaggagtttgagaccagcctgaccaacatggtgaaaccccatctcgactaacaatacaaaaaagttagctgggcatggtggcatgcacctgtaatcccagctactcaggaggctgaggcaggagaatcccttgaacccgggaagcggaggttgctgtgagccgagatcgcaccattgcactccagcctgggcgacagagcaagactctgtctcaaaaaataaaaataaaataaaggatgatgtctttatcatgcagaaatgtcaaacattttgtgtaatacacttatttctggttatggcttttgggtttcatcacagtttcctttagtaccccagtgacggccaggcgcggtggctcacgcctgtaatcccagcactttgggaggccgaggcaggcggatcacggggtcaggagatcgagaccatcctggctaacatggtgaaacgtcgtctctactaaaaatacaaaaaaaaaaattagccggacgtggtggcgggtgcctgtagtcccagctactcgggaggctgaggcaggagaatggcgtgaacctgggaggcggagcttgcagtgagccaagatcgcgccactgcactccagcctgggcgacagagggagactccgtgtcaggaaaaaaaaaaaaataccccagtaacaatggcttaagtcccccatttacttttaggagtttccagtgcgatggagccagcgcccaggctcatgacccccaccccagctttcttcactctggccacatggcttgtcttcagagctttgtggaaagctgtgcagacaggcacctctgtccacctggggcaccgatgccatgccagggcctgtcctgcagctactggggtcacagccctccaggagtctgggcagaagacagtgtttatgctgcacctgaaaccgctttgcctgtttctcactcacagagctcccctccggtcaaaagctctggaacccagggcatgagcccacatgcaggaagctagggcccaaaggggagagagctggctgcggggagaggccaaggccgcccagcagggagacagagcgacgtctcaccctgaccagtgagcccaagctacttgtcccaccggggctcaggagaccccattcgttgtccttcttcctgggtgcagggctgcctttcccagcactccctgtggcccggtgcctaagttatggacaacggattgcaaaccagtgtggtgggaaaggggaccacaggagccatcttggaggctgcttgagcacccggccagcctggacccccaggaactgacaaaggtgagggaagggcaccagcaaagccaggacaccatgggcttcttggaaatgatttgatatttgatggttccaaacagcatcaaagtaatcaatgtgggagcagctcagacctgtgccgagggggtgggcaccagtcggcactccccaccacccttgctgggacctctccccgcagcctggctcccggtgcccacccgccttctggaggccccagtcccgcctcgcttctgcccgtcgctctcaccacaaccctccccgccccggtgtctcactcatgcctcacacctggactctccagtggcgcacaccttagagggtctcacatgggaagccccatggtgggcccagccgggttcagcacgtgggcctcctgggagccgccccacacctgcgcttctcaggggcgcccgctgtgggtcctgctgtgggtctgcagaccacactttgagagcaggctccccgggtggtggccgacgcctgtcacctgtggccccgcttaacccacccttcaccggcactgagtccccccgcacagaccccgggatccaacccccactatgcggaaagggaagctgcacttggggtgacaggagcagcaggtcaggggccctgcaccagctgctgccaccggcccctccacctcatcctagctgcccatggagggactcccccgaatccggccctgacccagcccctgaccctgaccctgaccccccatcctcacccgcatccccatccccactggacgccccaaagatcacagcgccctctgctgacaccggagtcccaatgctgagaaggctgattggcccagctctgtcaaacccagtcacgtgatcagagcagggcctcctctgattggccatcctgggggcactgtgagtggcagcctgccaggccttgcttttgggtgggagccgggttccttcagcccctgcacgctaggtgcaagccacgactcccgctgcaagggattctgggtggtgctggtgtccgggcctcgggggagccctggacggagccctcggtggttgagctgggcccagaacacctggccttggctgtcccctctcactctggggtcaccgggtcaggctctccctcctacaggatgcagtggacgcagagggggctgttggctgaggagggggtacttgaggaactcttctttgggagtagagacagagacgtgctgagactggcttgggggtcgtccatcctcaaaatcccacatgggccccccaggtcgccccctccccacctgccctgggaaatctcccagcagctgttttctggaacaactgacggctgaggtcagctggaggtcagaaggagggtttggagcccaggtgggggtgaggatggggaggccccaggaggggtgggggcggcccggccatccgggagccacaaagggcagagagagtgcagcgccgcggccagcagccaacggggccgccagcaatgtggtttcaatctaattgtcccaaaatattgttacaacacaaaccacgtgccatccactcacctgcaactaatcagcagcaaagctaccgaataaatcggttccacaccctggggccgggcagcccagcacgtgaacccgggtgcccgggctcggacagaggccaggcggctttctgccggggcctgtttcctgttggggcaagaattgtcaggacaagtgtgggtacgacagggggctcctcctctctttgtgacgccccacttcacgctggaggcagagccagaaggaacagttcctcatgtcacagctggcccaggcccgagagggtcagccagggagtggggggccgcgccgggggtctgtccagggtctgactgtccagggtctgacagcccagggagtcctcagtgtcctctctccaccctgatcattctgtcctgagatggtgaccccgagggtcttcacccatgcaggaacatttgcacgtccacccacagtgacggtaagaccggcttcaaggccaccgaggcctttggtgattatgatttgagtgattcctccaacactcagaagagctaaggaggaaatggaagctgactgaaggccctggagcctggaccccaggcctggtgctggcaggtggggcctcccacactcgggtccctgcccggcagcctgtacaccgaagcccagccggggtggaaacaggccctcctcagggagcccgcagccgggcccaggcctccagggacagcagacattccaccagtaagtgtgggggcagcaggcagccctgacttctcccggagcctgggggaccccatggcggcctttcagcttggccttgtgggtaaatggggtgcccacgggcaggaaagatggcataacactggttccacacccacatgggcttcacatatggtcacagataaattccttgtgagtttgaggatggcccagcatctcccagcatctgccagaaggaaggggcctcatcagctgaggtcgcaagtgtgtgctggtgcctacaacctcagcacagtcgggggcgtgtcggtggccgccgctgtggaggggaagccagtcccaggctttggagggtgcacaggcccctgccgcccttccctacctggtgcctgggccacctgtttagtgagtctctctgaaatcccagcacccactagccactcagcagtagtgactcgagttcccgcacctgtgcctggtcctgcagcagtggtggggagagtgatctgtgagtgccctgaggctgccatgacaagtggccaccaacccagtagcttcaagcagcagacctttattgcctcacagggccacaggcagaagcccacagtcaggatggcacatagctggttccttctggaggctcggagggagatctgctcctgactgtctcagctcctgggggcggctggtagttcttggtgatcactggcttgcggcggcgtcactctgatctctgctgtcctcgagagaccttcctccctgatgtctctcccctctcttctgaggacacatgtcattggatttagggcctacagtaatccaggatgatctcaactcgagatccttaagtgaggatcagagatgtgaagcagcctgccccaaggaggcttagctgggaaacagccgaagagtaaaacctgaaaggccacaacaggtgcctcatgacagcggtcagatgctttgtggcatggccagggacccgtgctccaaccaggagtcgccacagtctgagactcccctctacagcggccagccatgctgcccacccgactgtgcagaggtggtaggcaccaggcacacccctgcaacctcggctgataaggcccctgccttctgggggaccctgagatgctggggagactggagactctgggccatccccaaaccactgctgtcacttgaggcttagcattgcaatgcctgggcatccctgagtgccaccgtgagcctgtgtgtctcgtgacacgtgtgcagatgttattcccggcacagatactgaagggcgatgcgtgcactcagcagccaggagggttgcagggccagtggtgagaggaccaggttctggctcaggctcacactctgaggcccccaaaacccaaaccacgaaccaggcaaggcttcattctcagccacaggggaggccacgcccaccagcacctgcccgacgccggggtccacctccaacaggtttctggcggtgggaaaaagtggaagatgcaggccagaggaaggatgctgcctgaccgaccacagccagctctgcctagcagccccgagagcaggcagaggagggagcaggaagagaccacagctgatcccagccttcctggccctgacgatttcaccttccccatccaacctttgaatgagaagcaaagtgggccaggcaccatggctcatgcctgtaatcccagcgctttgggaggctgaggtgcgaagattgctcgagcccaggagtttgagaccagcctgggcaacacagcaagactcccgtctctactaaaaataaaaacattagctatgtgtggtgacacatgcctgtggtcccagctacttgggaggctgagatgggaggatcacttgagcctggcagtttgaggctacagtgagccacgattgtgccattgtactccagcttgagcaacagagcaagactctgtcttttaaaaagaaaaaaggcaaagtacagaggcattgcctgttatccctgctgccaacgggtctggccctcagaagggatgggttgccagatgacgcaggtgggcccctcctggccttgcacagggtcccccctccttttttttttttttttgagacagagtctcactctgtcacccaggctagagtgcagtggtgtgatctcggctcattgcaacctctgcctcccgggttcaagcgattctcctgcctcagcctcccgagtagctgggactacaggcgtgcaccaccacacccagctaatttttgtatttttagtagatacaagcctcaggcttcaggcctctagagccacaagaaaacgaatttctgttgtggtttttttgtttttttggagagtctcactctgtcacccaggctggagtgcaatggtgcaatctcggctcaccacaacttctgcttcccaggttcaagcgattctcctgcctcagcctcccaagcagctgggattacaggcatgcgccaccacccccagctaattttttgtatttctagtagaggcggggtttcaccatgttggtgaaattggtctcgaactcctgacctcaggtgatccacctgcctcagcctcccaaagtgctgggattataggcatgagccacctcgcccggccccaacggacccatcttcaagtgtgtaattcaatggcatcaactccattcacgatgttgtgcaactgtcacctctattaatagttccagaacatttcatcatcccaaacagaaactctgtactcattaagcaatatccctcccaccctccgcccccccgccagtccctggtgaccccaaatcttctgtctgtctttgtgaatggcctgttctagaagttgcacagaagtggaagcacacaccacgtccctttctgtctggaattcctcagttagcataacgtccctgaggtccatccacgcagtagcgggtgtcagatttccttccttttccaggctgaaccctgttccacacgtggctagaccacaacttgtgtgtctgtccactcatgggtcgacggcacttgggtgcttccacctcctgctggccgtgaccagggctgctgtggactctggcgctctcgtctgcaccagctgctgccttcagttctctggggtctgtagccggagtggcatcgttgagtcacgtgggaatcctgtgctctgctttttttcttttcttttcttttcttttttcttttcttcttttcttgagacagagtcttgctctctcacccaggctggagtgcagtggtgcgatcttggctccctgcaacctccacctcccgggttcaagcgattctcctgcctcagcctcccaagtagctgggattacaggtgttcaccaccacgcctggctaacttttgtctttttagtggagatggggtttcaccatgttggccaggctggtctcaaacttctgacctcaggtgatccgcccaccttgacctcccaaagtgctggcgttacaggcgtgagccaccgcacccggcctatgctccactttttgagaggccaacaaaccccacttgctttttcaatccagattttaacctttgagggaaaagaaagatttttgtatctattcctgggccggggtaggggggctgttgggtgaggaacacccaagaacggctcaggtgagaggggtggcctctaagaccacatggcctggacacagcctggcaggcagaccgaagcagccggggctgcctggagggcctcagttctgctcctccccagctgcaggatctgagcaggaggcctcctcactctgcgcctcagtttcctcatctttatctggggacggagcagcctctacctctcagagctagttgcgatcatggtggcagctgaggcccagccctggtatgcagtgagggttcaactgagccagcccccactcgccacaggcttgcctggggaagacaggtgcatcagccccggggtccatttcgcagtggggctgatcccagcccaccctcacccgcccgggagcctcgcccttcaccccatgcatcttctcccctgaatcacccccagggtctccagggcaggagcagggctggcaagggcagggctcacagccccatagggaggacacagtgcccgcaagagggactgggcaagaggtggacaggcagggggtgggggcattctgtgtgccccagagcctgagttcgcaggctctcagcagcccgtgctgggcagcagtgtgggcgtctctcccgcagggcaccctctgcactttcctgcagacctgcagcagccctttcctgagggacacctggctccgggcccagggtgggggcggggcctcgcgtgtctcccccttgatttgtaagagtccagggctgtcggccatggccacactgagcacccctgggagccaaggcagcttaaggacaaggtgtgtatgaggacggcggggcccagggaggagaggctagcccagggctacccgggtccccggagtaggggcaggggacttgaaaatgagcccccaaggggctctgatgggggcaattccaggagaggcgtgggcaggtgtggggctggagagaggcctgtcctttttcccttgccctgcacactgtctgcagggtggcagacccaggctgcctggcgaggctgcttctggaggcctgaggaaggctgggctgaggactccgcctctcctcaaagccacagcctccctgctctggggctacatgtcgggaaaatccctgcctgggttaccccagctggggactcaagctctctttggaccctacagaaagagctggccagcccccaggccagaagggccgtccgtgacccacagatggccccaacacactgtaaaacacgcatgatttattttagtgtgtgttagaaaaataaagccaacacatcaagcctgcaatttcgcagatactaacacttcggaccaggaaaaaagaagcccatgacatggcacagcgctgtggagcgagcgagatctgggatgcgtaggcctggacggctgaggcttggaaacccctcccctccccaaactttcccaccatgcaggggcccagcaggccctcagcccactcaccccgccagaggagggaggagggaggagggtccgggccaggtgggagcttctccccggaggcctgaggcagcttccctcctctcccaggaaggggctggcccaggcccagctaggatgctcccagcccagctcctacccgccgggtctttcccgtttgtcaggcaggccggcaggctgggctggtgactcatgactggctgggccatctgccctgcacccctgccccgggcgaagtgagaaacctgaccgggctccagcacagacaggaaaccccaccccagggcctgcagtgggacaggtgtggccgccctccacccccacacaggcctcggggagggtgtctgaggccggcctggccctctctgcagcactgaaacaccagctgcctctccccagcccggaactggggatccagtgtcctccgcactgaccccaggctctgctctccctgggaagcacccgctttgacagtggggccaaggactggggttcccaccctcctctgcccagtggactttgtggccccaggcaggtggcatcagctctctgggcctaagcttctcatctctgcagggttcatcagctcaacaagcatttgtgggttcctgagacctgaaggctccactcccccacctaagcacacaacagtccaggcaccacccacatctccctcttacctggagcagaggggcgggtgttcggagccttggggcccagggtcatttgcactggagggggccaggaacgctcccaggagtgtggcagtcccttcctagggggcccctcctggagcagctgccttgagagcccagcctacagcagagcctggtggggtggccgggctactgctacctggcttcactgctttcttctgccattcctcccaggctacccaggaggacgagaggggcagggtactggcggcagcaagagagaacccgcccaggagggcccagcacgggaactccagcctccagagccagcagagccacgggaacaggagttcctcctcacagaggaggcgctgttggagggccaggagcaaactcccagcagagcaaaatgcagaggtgaccagcccagggcacaccagccactgaaaaacccaacagtgggggctgccgtggggatccagggttgggggactctcagacggccccccaggcttgtccccatgcgtattctttgagctgatggggacgcagtgttcacagtcctgacaggaggcaggcgtgaccccagtcggggagtggacttggccctcttcacacccccagggcagaaagccctgttcagaggtaccagggagcaggcacaggccagggtccgaattcgtaacaagcatccgggactccacatgacgcaggtctgagaatcgatcccgggttccagcccagccatcattttcagagaatacgggccctgtcccgagccgccagccattgccaatggctgcccggaggaagggaggaaggggtgcccccagcttgtggaaccaacaagggcttaatggtagggcacgcccaggggcagacgccaagaaaggagaggagggggcgggggctccggccagggaagccgtgtcctctgcaccaggcagaacagggggctgggccgccctcagcctggatctggccagggctgggatgccagctctgagaacagggcccagccctcacctgcttggtttgcctcttgccaggggaaggggctcaggaaggtttctgagctgccccatgcccctgcctggagttcctgaccctcgggggaagctgaggctacagagagcacgaagtgcaaaaggcctggtggttggacccagagcccctgtccctgggtccccgctcctccccaccaccccgtcccagctctcccacgctcccacgaggccacatcatcttctgctcctgctgagttccccttcacgcatatgaaaagcaaattacaggagggagaaggcaaacccggggtgaacgggggcctcctgggactccttggacccccgggagagcctgtgagggcttctatgggccgactgggatctcaggagcaaaataggggcccctagcccacagcggagggcgactctaatcagcagagatcgcccagcatgccttatcctcagcagctcagggccacctgtggggcagggggagggggcctggccagctgggtcggccgcccccggcaaagccaggggacgccaggagcggagctgtgtggtgcagagcaactgtgtcccaggggagggggggtctgtctccgctcctcccagctgcaggccctgggcagccgcaacctctcagagcctgcctgcccctctcctgaggtctggattttgccagcacagagcagggacctcagcaatatgcccagcctggcgcaggcccagggcaggccctctatccgcagggcatcctctggtctacaagttctgtgacgacgtggctggcaccagggtctgagggctttgatgctggggaacgtccttgcgcctctgcagtagatgtgaaagtctgtggagcccggggacctggagcaggtggcctgggtggggctgctgccttctgggccaggaccagattccactccctggctggacagccctgggcacagcgtttaaacacccaacacttcaactctgctctgtgaaacggggatgattctaacagtgctggatcacggcatggttgggaggcttgggtgaggtcatgtgttccatgatcctgtccacacgaaggtcatgcagccttggggggcactggagcggcaggtgtggttttggggacctgccacgggccacagccctagaccaagccggaccatcgggactcttttcctggaatttgaatgctgagccgagggacactgggcttgtgctggggccactcccgagccgctgctgttggggcctgaacagcgccttccccctgccctccctgctgcaagctccaaccaaatacctgctcccggcttcagttagtcagagtccacttctggcacctgcagtcaaatttattgattgattgatttgagagagtcttgctctgttgcccaggctgcagggcagtggtgagaataaggctcactgcagcttcgacctcctggactcaagcgatcctcggcttcccaagtagctgggtctacaggcacacaccaccacgcctggctaatttttgtgttttttgcagagatggggtctcactatgttgtccagcctgggctcaagcaatcctcctgccctggcttcccaaagtgctagaattacaggcatgaaccaccatgccagccgaaagtgtctctgcacatctgcacaaataaaatgtatttctgtacgtacactgatttgtacccagaagcccttttaaaaaatattgtgtcaccttggcttcctctcttacttcttgctccccctttatgtaaaactgctgaatcttttgagtgtcagttgcagacaccttgacacttcaccctaaatactgtagcatcaaatgtctaagaacacctgcctgcctccagcagcacgcctggggaaacgcagtgccacacagaacgatgcacggccccgtggccccgcctgctgtgtgtaaacttcccagtcagctccacggcccgccagagcagtcccaccccaagcctcgttcaggatcctatccagggtctcccgttagcctcctctcatctataacacgcaccgcacccttttgcctttttaaaaacattgcccttttctgagcatccggagaggtgattccgagaatgcctccggatccgactcccctgtgctcagtgcaggtcaagcgtcccaggcaggagcatcactcaggggctgctgagccacccgagggaaggcaagcctgggagaggcagtcccgcagccgttgtcctgccactcgggggcctctgatggcctctcctctggtgccatctcccaccccagagctggacagcaggcctggggagtggcctctcagatctgtccctttggtggtcttggggctcctacgggggcaccttcctcttgtttctcccctaagcaggcaggaggtggctggcggagagcagaggggacccctgatggctagaagcgaggggggcagtgcagagagagcacagctcgagatggagaactctccctgggcgtctggccactgcctgaccctcaaaccaaggggagtgtccgagagtcaggcaggagggccaggtgcagaggtgggccaggtgcagaggcaggccagggaggcatccggacgggaaccagccccccttctcctgagaaaaggctcacggagatggcaagcgtcccagccgaggccccttggggcatggggcggccctgtggtccagttgggtacaggaggaaggtgggaccggccctcaatcccccccggcagccaggggtgctgggagacagagggtgaggcatcaccgaatcccagggtggactcctatcggggtgggtggaggagagggaacccttcctctggcagggccctctcatcttgtcttggagcctccgcatgggtgcgggatcgccacttcgcagcgggctctggccatcaggcagtccgtggtttggagctgtcaggacccgaggaggtgccccagcacgtggcaacagcagggggccgtcacctcctcaggcagggggtgaggagagaaggtgctgctggaactggtgagaggggccttgagcatgggggcccgaggtgaacgtgcacgccctcctccctcccccctgccctcaggcttccctcgggccccagtgcccagaagccaccattaggcacaggcacagggtcagcctccagggtctgagcagggtggggacctgggccatagcccctgcctctccagcccagcagccactccagcctggccccttcactcagatcaataaaaagtgtaggaatgaattccacttcggtgaaagcatcaatgaagagcagattcccaagccccaggattgggtccacggccaactctgcagagcttagggcccccagtgggccggctctggcacctgttaggacccgcccaggggaaggggaggagctgtgggcctcctgctgtccaccctggctcccaggtcaccctgcaaggccagcaccgcccttctgatccccccagggctgtggcctgggaatagccacccccagcctgggacagagcaggtaaggcccgggaggaggggaccgctgaccttccccaggagtttgggaactgctcacggcttgtctcagttctccagctggctgtggacctaggatggacgagaacaaggagggagccagccaggggtcagggaggctggggacagggtggagcaggagcccagtgtgacacgagagacctggagctggagaagcagtgccagcggcaggctcagcaggacttgctgaaccccaagggtagggtgcggacagggaggccaccccgctcgggagacagcagcccccctctgccatccacgccctcactccacatcccacaggacccctgctggaatagctgtctctgcaaaatgcccgtaagtccacagaaaccgccaaagctttcctgagactggggacattatctgcagcaatggggaccacatctggtgtaccgaggtctccagtgctcgagcggggaggcacgtgagagcagaggggatgggagccctgagttcctgagctaatgctacaaagtcagcactggactagcacatcaggtggatctaaccaggccccagcgaggctctgcagaacgtggaaggggtcagaactcactcttcccagcaatgtcctagaggcagtggccccgctgccctggcctgatgcgggctccagagctgtgggatgcagtgtgagcccttggccctgagaagctgttctccccagtctgcctcgtctgggaagccaggtcagctacctggctgaaggccatgggcactatgctgggcaggagcagggatctgccatgtgccctgcgggatgatgattttcattaatctgcaaaacattgtgtcttagataagggtaggcttcttagtcagacaaacctagctccaatcctgctgtgtggccttgggtaaattactgaccctctctgtgcctcatctttaatgtgatttccatggcagggcagtcatggggacgccaagtgctaatgctataaacagaccaagtacaggtgctggcctgtgccaactttctcttccttctcctctcccttcctaccccatgtccctgtggccaagggacaaggtggttggcagtctccatgaggtgcctggggctggcgctcttggccagcataagcccaccaggctctgggaagggtcagccctgctcagagtgggcagatgggtaggcatggccgagggcacgaggtggtcacaggtaagctgccggcagcaaagggcagcctctcacctggcctttgggcagagaagccccgcccagctgtggcagtgagctgggagcgcatctgtggccctgccctgctctttcccctaatgtgagcttcacccccgccctccttgagcatgcccagctcttccagactcacgcagtcacatttcacaagtagaggaatgctggggggccggggccgggccaggctgcacccagggccacccacatgcccccacccatgagaagcagcaggaagtcccctccccctcctccacccctgtctgtccaccttcagggtttggctctgatctctggctctccaggggaaatttccttgtggagttagtggagtcaactttgctgacaacagtggggcctagaatgggctaaggacattatctctgcacctaggaaacccccaccattcactagttattcatccatccacccacccatctatctatccacccacccacccacccatctatccaccccccaacccacccatctatccactccccaacccacccatctatccaccccccacccacccatccacccatccaaccatccacccatccacccatccacctatccacccatccacaccccatccatcctatccatccacccatctgtccttccattcaataaacgcttcatgagagaagagacccaccctccagagctgaccctgtagcccagcccaggcctcctggcacggtcattggactgcctgggttagatcacatggggtcctggtggacacgtcgactctactctccagggctgggccctggcatctgcattttcaccgaggtcctctgaggaccacatactgatgcttttttccacaggctctgaaggcccagccaaggagctgacaaagcaatggacggtggcgaggttctgccaggggcccagccatggctctgggggtgcagagacctgagcagaggcctctaagctccacccatttcccaccagcctgacacaaggcccaagaaggccagagttctggaatgtaggggatttggggctacacttccttataggacaagggagtcctggggacagggtccccaacactgtgcaccctttggtgggctggcacttgtctccaaaaggagggctccaaagtcggggcgggttgcctgggtcccagctgggccctgctctggactcctggctctcctttcaggctccttccccaagggcgcatcccccgcccggcctgagcttcagtcagggctcacacccttccctgtctcactcaagtgggcctttccagggtcagtgagagaccctggggaccccatccagcccaggccacacggcaagaggggaactgcttgcctaggcccgggtgtgggtgtgagaatggctggaatccttccaaggtgcccttgccttcaccctgtgccccccgtgctcctgcacctgggcactggggctgcagagctgctgaattgcaagggggacccctcacccttagatcttgttcatgctaatggctttgcaggggtcctctgatgcacccaggccccctcctcccagctggcctgattagcaatgagcgcaactccgggaaaattattaatttctatccctcaagtttacttctgggaaagtttgccaattaacttggcaagctgaggctcccaaaataaaaggcaaagggagggagaggcactgggacggtccttggtgggaggggcagcaggtgcagactccatcctcaggagtgggggtggggtggcctcggacagagccggggccactggctgggagtggcctgaagtggaacgaggaggtaccctgcagcggccccgcccaccataccaagggtggccccacgcagggctgcaccgcatctggttgaaactcgggaggtctgggcgggggatgcaggggcgcctgggggccctggctctgacagtgtccacatctgcacgcggaacacacaggctattgatgggtctgaaataaaaggggctgagggcagcgggcagagcctgggaccaccgcggctgggcatcttcccatccaacagtccccagctctggtccttctcactttcttctgtttgtttgtttgttttgtttttttgtttttatttttgcgacaagttcttgctctgtctcccaggctggagtgcagtggcatgatcacggctcactgcagcctcaacttcctgggctcaagcaatcctcctgcctcagcctcctgagtagctgagaccacaggcatgtgccaccaagcccagctaattttattttattttttgtagagatgagggtctccctatgttgcccaggctggtctcaaactctggaactcaagtgatcctcgatccttggcctcccaaagtgctgggattacaggcatgagccaccaggcccggccccttcttttgtgcaaagccaggccccccccacccccgatgctgggctccacactcccccagaaggccttccccctctcttccccctctctgaccatgcatctgatgcggtttgctttggctcagtcactggcggtgaaatgttgctgtcacaatctcggctcctgccttgctctgaggtctgtgtgtgggttggggagggggcagcaggatggcgccccttcccagccaagcagcctctgcacagtgggtgtgcagcctcagggaggcagatgccaggtgcagaaggaagccaaggagacccacctggagaggcttctgggccctcaggccttggcactgactacggggccctggctgggcagatagcgccagaagggacactggaccctcccaaggctagaagaaataaccaatccccactcaacgaggctgcttcctctgtggccagatcgaaggcagggctcctgatgagggggccagaggcactgggccagctgcttttggacccaagggacctgcccagatgcctgtgggggtgtggggagtgaggggagccaccgtacccaaggtcgcagcatccctgggaaatggtcctgcccagcaggcttccggatgtctggttcaggaatgtctccccaggcccactctgtagtggccagagacagaagggcaaggccatggctttttaaaaggcagccagaacattcgtctcctgccagagtaaggccatggctgtgccctccatgtccccggcacttcccgccaccccaggcttatctcatctccggtgcctcctaatggaggcgctgtggcccagcccctccagcaatgtcccaacagcccccatcaagccccagaagtactcagaaacataaattaaaacaaattgcatttaaaaattacaaataggggccattttatcgttttttattacataacaaccattaataaagtgtagtccctgcaccttcattgcctggagactaaagttcaattcctgtcctccatgcaggctggggatgccattgtcacagccacgtacctggggtaatacaagtgtaaatacatttatgggcaggaagaggggcttaggaggagggccctgccgcccacagggcagggcgggtcctggagctctctgctgggaggagccactgccttcctcccaggatgatgatgggttaggggatcctgggaccaactggacatgaagaggccactcccactggggtagaatgaggtgggggctgagatcctcctgcctccccttcctgatcaaggagggcccatgcaggagaaggagatgcaggcgcaggattggctgtatggtgcacacacacacacacacacacacacaccctggacccccgtgacagggaagcagaacaggaggccaagaccagccacacactgcgagaccagcggccaggctgcccagagcccttcctgggttcagcctctttcctgggcttctcgtcccactggaggaagggccaggagggcagaggtccttcctctttccacactaagcacccacagtctgcagggatgtgtgagccagaagctggggtcacccctgtgctaagcagccagggctccccaactgcccttgccagacaggtgggcccagcaactgcttcccacctgaacccactgcacagcctggcaggtgggggcaagctggaacgcgggcagcagcactgggggggatgggctgtgtgcagagcccagcagccacttggctgccagggaatggcccaggaatcaggcaccacttgtgctgcagccccttcccctcccctccccctcctcagcctcctcttctaccccagggcccaggccggttaatctttaactgcttctggactagcactgaccccaaaagcaaacacagcaggattcctggggaggagacatgtcttccaagtacggctgggcagtggtgtctttttttttttttttcagatggagtctcactttgtcgcccaggcttgagtgcagtagtgtgatctcggctcactgcaacctccgcctccccggttcaagtcattctcttgcctcagcctccccagcagctgggactgcaggcgcccgccaccactcccggctaattttttgtatttttagtagagacggggttttaccgtgttagccaggatggtctccatctcctgacctcgtgatccgcccgcctcggcttcccaaagtgctgggattacaggcgtgagccaccgcgcccggcccttaatttttatatttttagtagagatggggtttcaccatattgtccaggctggtcgcaaactcccgacctagtgatccgcctgcctcccaaagtgctgggattacaggcgtgagccaccgtacccagcctgcagtggtgtcttaaaggaggcactgggtgagggtcactggctccaggtgggtggggtgtccaggcctctgcctcgtgcccctcaagcctcattcgtgctggagactataagcttctccccagttcagagctgcaacctttcccaggcgtgaccaggggcagggacggcaagcagaaggggcccgcaggaccccaaggccacgtacttaggagcctgatgtaaggctctgaaggccggggagggggctatagggccagagcaggggaggaggtccccactgcagctcgagggcagaagtgtccccgcagaaagcagaggagggggcgcttcctccagaaatccgccaggccattgttacactttctgaggccagggaatttttccaggaggttgtgacaaccaaaaataataataacgcccctcccccagcagcagggattctggaaaaaacagctgctgcagttatcagggccgaggaaaaaacaaggtcaggcactgcgaagatttaatttcaagcgcgtccccgcagcccgccggccacgcaccgcacgcacgcgtcctccccgcgcggggtggcggccggcgggagccacgtggagcagccgcggtgcctccggccacgcctggctcccgatgccgcgaagggggtcttggggcaggccccgctccccgaagctgtcgctgcggctcctgccagccgggagacgacgaggggaaggggtgggccgcgctgggccttccgtccatccgtccttccccagctctgcgggggctaaatccgtcttcaacaaacctcgcgaaaaagccgagggggggacgcgccgttgctggagaataggtcagaagtgacagcagaatgggccgctgagacccccgtccccgccccggtcctccgtcggcctggcgggcggcgacgtggggaggggccgctcagaagccggggtcgcccgggccggggaacttcctcgcgccgacgcccactccccacgggccgcactcgccgaggggccgaaaggggctccagtggaggacgcggtgggagctgggtcccgctctagctgccgacgccggcggtgcccgggtctccgggagcgcagtttttggcacaaagtagcgccgaagaccctgccgggtgtcccgccgcggctgccgctgtgcccgcgcagggccggctcgtgaatgcgtgcgggggctttcgagggcgcttcctctaccctgcgcgcccgggggagctgtccggtcgccgccggcaggcagaggcttcgggccccatgggtgcccccgagaccccggatcgtgcgctgagaatgtcgacgtttcaaacgagccagcagagcgggccggagccttggtcgggaaccggcgccgcgtgcgcactggccggcgaggcctctggcccgccggggaaggagcccagagcgcctgtctccccggtagaaaccaacacacacaaataattatccgtatttcccacactgggggattgggagtaaggagcaaggataggggaggggacaggatccaacccgctggttttttactttaaaaattatatattttatgtcacgatcgcttttcgttaagaccacaaacatccaatttggcttggcgtaataaaatcagccggagctcccttaaacggagccattccggtgaattaagttgtgaaatctaatctattatatccataaaggagaatgctttcattgtaaattcaggttacaaagaaactatacctgggccgccggcctccctttcggatttactacttgaaggcttatcaaattacttcaaaatgctgggctaccccctccatatctcatggcaacaaaaattaaacgtggcaacatttcttttaatagtaggaaaggtcaaaaacaaccgccacaacaaggggatataatttttaaaagacatccttccccaccccgggatgtcttctccgcgtttggaagcgcccttcctattttcccaattaattcgagtttttaaaatatctaaacgcgccacgacttccttcaggttctcccccgctccacgaggcgtctgaggcgcagctcccggatggatcgcacgtggggccgcagaccctgggcgcccggacgtcagccggaggcgcggggatctcgtggctccgctgcgaacctgcgccccaccgcggcccgcacacctgggccgagccggggccgcctcgggagcccctcgctggctcctgggcgccccactcggctcagcaatgtccgggccagacaaaggagtcgccagggaggggttaatccgcccctcacccttctccgtccttccttccgcccccttctcaggcggcgcggaggagagaagatgcggcccctaataatgtgtttggtttaacctgcggggtgtgggtatttgctgcgctttcttgggtgagggttgggccccttcccttccaccttcctccactcctgtgcatgataccctggctggggcctggggcgtcctgcgctggccagaagtcagggtcaccagggactctccgttctcgctcccgaagaggggacttgcgcggacggcgaggaggatcgatgcgttcctgagttcccagggaaacgaggccgcggctgttgtcacgtcgcgaggaagatttatgaggcgcgggccgagcatggcccggcccggcggaggccgcccgcgcacccaggctaatctttgatttccatctgattattttttttttcctgccatctccaagtcggcgtccggaaaggcgaacaaagggaggaggatgggggatgggggcgccaagcggtggcgagggctcggtccggcaaccttcctcctcagtgggggcccttgggcgccccaggctcgcgcccaatgcggggcccaggagggcgcagtttgaaaggtgaccgggctggggctgtcggagacccgctctgcggggtggcccttctagccgctaggcccacgacaggacttctagggaggggtccctgcaaatgcccttgggcgaagagaggacggaaagaatattctcccttaaattgcaattaagggtgtgcggggcgggggtgcttggggggtgctgcggcaggccgggttcgctcaaccggaggcagcagctcagccctgggccgataaggccgagggaaacgggatttctttgcttcccgcacggaaaagatccatccaagcgggtaagagggaagcgaagcttgcattttttatgttgaaaaaaaaattcaaaatggaaaatcattttattggtcaccacccataagtaaactaaaaacagggataattagagtgtggggatttggagggaccataaatctgcggcgccttttccactggaatcaggagcctttatggcttgttgttttattttgagagaaatgagatccctggctttggtgcaggcgggtgtgcgctccgagcgtctttcggcgggggggaggggggagcaggaggggcgaggagacttgcgcagtcagggagccgcgaaccccgagtctcggtcctcgaaggcggcaggagaaaccgcgcgctgtgccccgacctctctcgccctggccaaccgcgacttgggacgagctggaggagcttcccccgggctccggacgcccgcgccgaaaaccgggccatgggtaccaaacccgactctaggcggtcattcactttgtccccacccaaactctgatgagctatttgggagtgcgcggggactgggaagtgagggacttttataacattcttctttcgactccggcttccgagcccaccacccatcttgcctccttcgcctccgccctttgttctaaactggggaggggggaggggggagagaaaaggacacaaaatcaccgcccccccgtcaaatccttaaatttccaatcttccgcaaaatggcctggaatccatttcactccataggggttctatcccccaccgggtggaggccagctttccaatctcccacacaagcaggatcctttcccacttctgaaagtcttcaaacccagtcaccccaaatgcaaacatcgtgtgaaaccccattaatcaggtaagaaagtagggagagctctgactcagctgcctctaattttgggaggagaaagagaaagtgagtttctctttcatcaagtaccccaaaataacagcgctccttcccttcagcccgctccaaccgcagccttgcctttgttgaaagacccctgtccttcctaggaaggggggcggggaggacaggctcacattccgaagagttctgtccccaaaactgttcgaagattcttttgtttgacgtgcacatgggggaggggaaggagcccgctcaggccacccggcctcctcggaccccgctcaggccacccggcctcctcggaccccgctcaggccacccggcctcctcggaccccgcccaggccacccggcctcctcggaccccgcagaatacccccaaagcccatgggcgtctcctaaccgtgtaagtccggggctccgggggctaggaggggctgctccaagacaagggaagctgcccgccagattggggccaatatcgggctttcccaacccaagcttcctccgaaaacaaccccctcaaaactgagcatccctactagaaaaaatccgcattttccaggaggacggggtgggagagcttcggggaacaaagcccggtcctcccagctctgaggccgaggcagggcgcacctcctcctgggcgaattcaatcggagctgcagaagagacaagcatttccaaactggcacccgctccgagcccaaggtgagggtggagaagggtccctggtggaagctgcaggaacactttgggccggggtctaccccgcgttcggcggctccccgaatcccgcagaaagacacgtttgcagcgaaaggctcttacacaccagccgggattttattcgttccctaccgagagtgcgctctgggagcgcgggaaacaaggaaaacgcacgtacctggcggcgctccgagggcggcctcgcgggccctccgctggcgaaggcccccagaagccactccccgcccggctgctcgccccacggccagtccctccctccccggcgacgcaccccgccgagccagctcacaggaagcgccaggagccggagacctggctcgcctttccgggcgctgcgtccgtcttcgaccgccagggcccgcgtcctctccccggccacggcccaccagagggaccccgcggcgggtcctggctcgggcgcgtccttctgcgtccgagttcccaggttcccggccgagctgcggagacggacgcggagccctcggggaagacgaggcggcggcggccgccgtccgggcaggagccccggggcgggaggggtgcagggcggaggagcgggcgggatcccagcgccccgcgccccgcggccgccgccctccggggcgcccagccccacccacgtggaaccgccccgcccccgccgccccgcccccacgagggaaggcacccgagcctcgccgcacacccgcgcctcccggtcccgggcccgaaacaccgcgcccctcccccagcgccgtgctccccgcctctccagcgcgcggctcccgcccgacccgcgcgcccgcccgacccgcccccaaccccgcccaatcaccgccctccgcggctgctccctttgtctgagcccccggcgcaggccaatggaatcacgcggaggcgcgggcggcttggccaatggaaggcccagggggcgtggctggcgggaggggctgcgggcggccgggttctatgcgctgagacccgagactgcgtcgccggcgggtgcgcccaggtcgcccagctagagccggcaggatcccgccgccgggttgtgggtttttgactctccctccgctgtcgggagaagcgcctgagtggggagggaggtgggaggaggtggccccgcgtcgggggtgcggggagcgggacggcggcttggatggacacggtcagccccgggccggagagggttcggctcagagcagcctgggttctgttcagagccctactgtgcacgtttccgcgaggatctgcggagagacgtgcaggcgacgcaggccccgggaaggaaggagggtacctgggctcggacgagcgataacgctgtgttctgtgactccgtacaaacggatcctggagtccagggaaagcgtcccaggcccccagcccgggcagggttcgtgggattggcgtccgctgccccaggcttaccccgaatggaggagtgacccctgtcccctgagctgggtcgcattgaggggaaatgccaggacacccgcaccagggcccaggcactgaaatctggagcggagcacagccaggcggcttggcctgtgccccgcgccctccccagagggggtcttcttccaggctggagcgcacatctcccctggagcagggggtgagggaagggcctcctgtgccctcagtcaggccctgtagggcagcaagggtggagaatgcctggaccttcttatcttgttaccccgattgccttcaccacggcaggggaaaaagtgacaaaactgcctttgggatgccaaagagctggtgagtgtcgctttctctgtaacagaaacatgtaaagcgggttgtctgtttctaggtggaggactttggtccgctgtgtcctgcatcttctttaaaagtaatagacacagtcttaattcactgagaaggaggcacatatgggtgtcagcagtcccaggcctcagggaacgtgcttctcacattttcctaagtttccaaaccttgtcaaagtgaaatcacaaactagaataaaaacagaggcaaagcagcccctggccgtgagatttcaaagggcctctccctgcagggtccagtccatccctgcagggtaagtggagccctgggcataaataaggcacagcatggcagaggagccagcaccagggaacacagtcttgtcacaaacatcccaggatctgctggagtcctgccgggccagcatgggccttctcagtcctcaggtccctggcactgttgtcaccaaagccacgatccctcaactgttgttgccaaagccactagacagcaacttttaagactccaccctggggttccccactccaggggtcaccagaattctgaggcgggcactctgctgtgtcccctgaggcccacagcagccccagggtctgggggactcagggaggacctcctagcatcctgacctcctccagccctggttgcagcccacagacccagatcaatatggccttaatggtgtggctcccagggattaagcagccaaggccagagacctgaatgggtttagaggctgagaagggatttaatcaaggtagccctccatacagttcctcctgacaccctcctctcctgtttccagtccctggagatgacaaaaaaaaaaaaaaaaactgaggccaggcacagtggctcatgcctgtaatcccagcacagcactttgggagtctgaggcaggcagatcacctgaggtcaggagttcaggaccagcctgaccaacatggagaaaccccatctctactaaaaatacaaaattagccagccttggtggcgaatgcctgtagtcccaactattcaggaggctgaggcaggagaatcgcttgaacccaggaggtagaggctgtggtgagccgagattgcgccattgcactccagcctgggcaacaacgagagtgaaactccatctccaaaaaaacaaagaaaaaaaaactgtaagtccattacaaccagcagggacaagatgggtgccctccgtggcccagaaatctggaggagtcctggggagatgggggtggggacgttgctctcgctggagggaagaaatgacagccttggtgcccagaagtgaaacctgctggcaggtgatggcagctcccagaggagccaaggggccctgggacagtgggagggggatggctggggtgtctgtgggagggcagcctcacccttggctgagtacactcagcacaggcagtggacagagaagagatcccattgtggaataacacctggagggagcggggagtcgtgggctctgagccgtcagccacagttgaggtgtctgaccacgtgctgctgatggacaagcagggatcccacacaaagctgggatcaccaaccccaaggacgcaccacaaactgaagaactaacacgagcgaactaactagcgcagagccggcgctgtacagcgagattgggtgcccctcctccttggcctgggctagactgaatctgccaggttccctggcaaggggtgtggccaggtggccacctgcagtggaggtgacagcagtgacgtgtgcctctcctgtgactggcccaaaaggccctccattaacttttcctttcccagggcctggcaacaaccagggtgacacaggaagcttcgcttgaggacagcagagtcaccctcagcctagggctctgagtgactgcaagaatcaaggccattgtcaaacggaaaccctgccatggttgtcaagagagaaatccacttctcttttgtttaggcatttacaccagcgtctatgcctcagagcagtttaacttacaattcaattagcaatttaatcattggtttttcactcccccgtagcagaattttacatccgtctgcttgctgtggtctctaggtggtgggtgggctctcctcccttgactttgggcttggcgagtgacgtgctctggctagtgggaaggtagcagatttgaaatgggcaaaggtttggaatgtgccagcaagggcagcctggtcttcctgcttgccagggacccactacaagcaggctgtgccccagagaagaatggagaacgcagataactgacgggggctccaagaagcgagaaacctgggcggacctcagcccagcccacatcccagaacccggaggccaggggcttggccaggtggaggtcggccctagccctgtgagcgtgagactcggccaccaagctttaaggtcgtcgttatgcagcactgttgtggcaaaagccgactgatacacctgccctggcacttggggatacagggaaacggatgtggtgaattgaagatgatgccacacgtcccctggtgtgccgaggtaaaggcttgggaacgctgggaagagggaggaaagagccagaaggttagcgcgaggcactcattccctgtagcttgactactgtttccagaaattgagggccggtttgcaattagagttaccccagaaagttgggactcccaggttgaaaaagccactgtttatgcctcaaacagtaggagaaaagatggtggctgttcaaggcctgtcactcaggcagctcagtccaacaaaagtgtgcaggcctacggcaaagatcagatgaaggctcaggttgcggggggaggggagcagatggcttaatgaatcatctgtcagttggacccggaagacagtcatcgggacccacggaaaggctctgcccatcctagagaggcaggctttgggctgggtcttctccctggagatgatggtgactttttctaacacgatgtgtggaggaagggtgggtctcacagatgtctggaggccaagggctggctggctgccgtccggctgtccaacagaagccgttaccccttctcatggggcccctggctggtctgcattcccaggctccctcgcagtaggtgtggctgggtaaccgtggtgtccaacagaatctggcagaagcagtgtgcaccagtttcaggagcaggtcacccttccaggaggcttttagggttcccccttctgatggctgaaatgggcacatcagagagactgtggaagacaaatgtgcaagatgacagggcagccttcagcctggggcccaaccaggccccaccccgcaggagcacttgcttgggcaggtcagggataaataagccgcgggctggcatgggcagctacgtttggggtctatttgctacagttgtgtaacttgcactgagcaagagtttcagaacacacagtgttcaaaaacaccagtaatagcttcagagagaaaagagattttgttctttaaaaaaagaatctggggaagtgaactcagatttttgcttccttcctcataattttaggtagtattcaaaaatttacaagaagattcagaaataataaccaagaaaactgcattcatgtgaacaaataaaaataagctttggggctgggcacagtggctcgcgcctgtaatcccagcattttgggaggccaaggcgggtggattgcttgaggtcaggcatttgagaccagcttgaccaacatggtgaaaccctgtccctactaaaaatacaaaaatgagctgggcgtggtggcgggtgcctgtaatcccagctactcaggaggctgaggcaggagaatcacttgaatccgggaggcagaagttgcagtgagccaggactgcgtcattgcactccaacctggacaacaaagtaagactctgtctcaaaaattataaaaaataaatagaggccgggcacggtggctcacacttgtaatcctgtatctggaattggtgggttcttggtctcactgacttcaagaatgaagccgtggaccgtcacggtgagtgttacagttcttaaaggcggcgtgtctggagtttgttccttctgatattcagatgcgttcggagtttcttccttctggtgggttcgtggtctcgctggctcaggagtgaagctgcggaccttcgcggtgagtgttacggctcttaaggcagcgcgtctggagttgtccttcctcccggtgggctcgtggtctcgctggcttcaagagtgaagctgcagaccttcggggtgagtgttacagctcataaaggcagtgtggacccaaagcgtgagcagtagcaagatttattgcaaaaagcgaaagaacaaagcttccacagcgtgtaagcagaccagaacaggttggcactgctggctcgggcagcctgcttttattctcttatctggccccacccacatcctgctgattggtagagcccagtggtctgttttgacagggcactgattggtgtgtttacaatccctgagctagacacaaaggttctccacgtccccacccgattagctagatacagagtgtctacacaaaggttctccaaggccccaccagagtagctagatacagagtgtcgattggtgcattcacaaaccctgagctagacacagggtgctgattggtgtgtttacaaaacttggactagatacagagtgccgattggtgtatttacaatcccttagctagacataaagttcttcaagttcccactagactcaggagcctagctggcttcacccagtggatctcgcactggggctgcaggtggagctgcctgccaatcccgcgccgtgcgcccacgctcctcagcccctgggtggtcgatgggactgggcgccgtggagcagggggtggcgctcgtcggggaggctcgggctgcacaggagcccacgggtggggggcgcggggcggggacgggaggctcaggcatggcaggctgtaggtcccagctctgccccacgggaaggcagctaaggcctggcgagaaatccagcgcagcgccggtgcgccggcactgttgggggacccagcacaccctccgcagccgctggcccgggtgctaagcccctcattgcccggggctggcagggccggccggctgctccgagtgcggagcccgccaagcccacgcggaactccagctggcccgcaagcgacgcacgcagccccagttccctctcgcgcctctccctccacacctccccgcaagctgagggagccggctccggccttggccagcccagaaaggggctcccacagtgcagcggcgggctgaagggctcctcaagtgccgccagtgggagcccaggcagaggaggcgccgacagcgagcgagggctgtgaggactgccacacgctgtcacctctcaatcgcagcactttgggaggccgaggcgggtggatcacgaggtcaggagatcgaggccatcctggctaacacggtaaaaccctatctctactaaaaatacaaaaaattagccgggcgtggtggcgggcgcctgtagtcccagctacttgggaggccgaggcaggagaatggcgtgaacccaggaggcggagcttgcagtgagccgagatcgcgtcactgtactccagcctgggtgacagagcaagactccgtctcaaaaataaataaataaataaataaaaaattgggctcgtttggttttgtggagtgttttgagacagggagtacagcagcagggtcactgtagtacagcacaggagtcactgcagcctccacctcccagggtcacgcaatcctcccacctcagcctcccaagtagctgggaccagagggtttgagccactacacccagctaatttttcatgtttgctttgtagagatgaggtcttgctatgttttccaggctggtctgaaactcctggcctcaagtgatcctccctccttgacctcccaaagtgctgggattacagacatgagccacctcaccccgccccactttctttttttttctaatcagccccaactcattatttattttcactggtctctaaccaaaatttgacatttccttcagtgatgaatgtatgacataactaaaataactaaaatgactcaaatcatgctgcgattgttgcagatatctttttttggaaacggagtcttgccctgtcgcctaggctggagtgcagtggcgccatctcggctcactgcaacctctgcctcccgggtttaagcgattctcctgtctcagcctcccaaggagctgggactataggcgcacgccaccacgtctggcttatttttgtatttttagtagagacgggatttcaccatgttggccaggatggtcttgatctcctgacctcatggtcggcccacctcggcctcccagagtgctggggttacagacgtgagccaccacgcccagccagccaggctggtcttaaactcctgatctcaagtaatccacctgcctcggcctccaaagtgctggaattataggcgtcagccactgcagctggccacagatatctcaaaatactgtttctgttcatcacaaacacatgtattgcatgtaccagaacttttgtgatgcattaatatgtataattaatatgcattaatgtgtacaagtataaaaaatatatgcaggggcagggtgtggtagctcatgctgtaatcccagtgctttgggaggctgcggaaataagattgcttgagtccaggaattcaagaccagcgtgggcaacatggggagcccctgtgtctctacaaaaaatttaaaaattagctaggcatggtggtgcgtgcctgtagtcccagatacttaggcggctgaggcaggaggattgcttgaggccaggagttccaggctgcagtgagccatgattgtgccactgcactccagcctgggcaacagagcaagaccttgtctcaaaaaagaaattaagaaagaaagcaagacaagaaaaaaaaaaatatatatatatatatatatgcaaactcatatacatttattattgtattgcagtgtaattggttctctttataatcctatatactttattttaaaaaacacttttcagaaggggtccttagacttcatcagtgccaagtggggcccgggtcaatcacggtgaccatggtcacagccaggatgggtggatgtggggcaagagttgcacgctggacacaagggccgtgtgccccagggctgctgaaggagatgctctccccttcctctggatcccccgggtgtaagtgggacgcctgcctctgccgcagcgcctgtcagctgacttgctcctgtcctgagtcagagctgagaggtggaaggactcaggaccaggaggcgctggggcctctgagtgctgcccctgcacctgcccacctcagtcttgtgaaacgttctgcttcttgatcatggaggcccgtttgaggcagaggctctgtgacctgcacacacctcccagtagaagatactgcagaaacactgaaactggaaagagggaaaaagtcaccccacacaaaggtcctgttttttgacctaggtgtaggctgcacgggtgtgttcattatgtgagcattcacagggcagtatattgaaaataggcgtactttgatatatgtttattatccttcaataaaaacagacaaatgctagcaaaaaaagagcagctatcgtaatattaataaaagacccaaagaaataaagaccaaaaacatgggatgggtagaaacctatatgatttccgctacaaccctcacagagatacgccagctggatgggctgcttctgtaaccgaccagctgcaaatgacagaaaacttcccagcgcacgggtttgtctcacgcagtgcaatggaagggggtagtagtccaaggtgaatgcagccactggtgacatcatctcagataagggttctgtctcttggtggctttcggcttctgtcctcgtggttacaggatggttgccgcccccctagttatgatatcctgttccagaagaagaaggaagagctgaggcaacaggccatccccacaaagcttctctctttctgcctacatctccttggccagaaccaggttatgtggacacccctatctgtgagggagaccaggaatctgggcatttcccttgagtagagaagaggaaggcaaagagaagggtgggagtaggtgacaagcctctttctacagagtcggccacaccaattgtgaactactgtggaccaaccaacatatcttcaaaacagagcaaaaaattatagaagtacactattaataaatccacatttggtctcagacattgagacaccaagcggacccaaagcaattagggatataatagatttgaaaagcacaaataggccgggcgcggtggctcacgcctgtaatcccagcactttaggaggccaaggcgggcggatcatgaggtcaggagatggacaccatcctggctaacagggtgaaaccccgtctctactaaaaaatacaaaaaaaaaaaaattagctaggcatggtggcaggcgcctgtagtcccagctactcgggaggctgaggcaggagaatggcgtgaacccaggaggcagagcttgcagtgagccaagattgtcccactgcactccagcctgggctgcagagagagactccatctcaaaaaaaaaaaaaaagagaaaaaaagaaaagaaaaaaaagaaaaacaaataacaaacttgatccaacagatctatataatggaactttataatcagtgaacagagactatattattttcacacataaatcagtccccagaattgatcatttattggaccacaaaagaaatctcaggtcgggtgtggtggctcacacctgtaattccagcactttgggaggccacggctgatggatcacctgaggtcaagagttcgagaccagcctgaccaacgtggagaaaccccgtctctactgaaaagaaatacaaaattagccaggcttggtggtgcatgcctgtaatcctagctactcgggaggctgaagcagaagaatcgcttgaatccgggaggcggaggttgccgtgagccgagatcgcgccattgcactccagcctgggcagcaagagtgaaactctgtctcaaaaaaaaaaaaacagataaatctcaataggttacaagcagaaaccataccgttcacattctttgactataatgagatcacttggaaattaagagtaagagccaggtgcagtggctcacgcctgtaatctctcccaacactttgggagggcgggaggactgcttgaggccaggagttcaagaccagcctggtcggccgggcgcggtggctcacgcctgtaatcccagcaatttcggaggcagaggtgggtggatcacaaggtcaggagatcgagaccatcttggctaacatggtgaaaccccatctctactaaaaaaccaaaaaattagcccagtgcagtggtgggcacctgtagtcccagctacttggcaggctgaagacagagaatcacttgaacccgggaggcggagcttgcagtgagccaagatcacgccacggcacaccagcctgggcgacagagcgagattccatctcaaaaaaaaaaaaaaaattatttgagaccatgtgggcctggtggcgtttttttgttttgttttgttttgtttgatgcatgcgccaccacgcccagctaattgtttgtatttttatttttattttattttttgagatggagtctcgctctgtcacccaggctggagtgcagtgacgccatcttggcccactgccagctccacctcccgggttcacgccactctcctgcctcagcctcccgagtagctgggactacaggcgcccgccaccacacccggctaattttttgtatttttagtagagacggggtttcatcgtgttagccaggatggtctcgatctcctgacctcgtgatccgcctgcctcggcctcccaaagtgctgggattacagacgcgagccaccgcgcccggcctgtttgtatttttttttttttaagacggagtttcgctgtgttacccaggctggagtgcaatggcgtgatctcggctcactgtaacctccatctcccgggttcaagtgattctcctgcctcagcctcccaagtagctgggactacaggcatgcaccaccaagcccagctaacttttgtatttttagtagagatgtggtttcaccatgttggccaggctggtctcgatctcctgacctcgtgatccgcccgccttggcctcccaaagtgctgggattacaagtttgtttgtatttttaatagagacggggtttcatcatgttggccaggctggtctcgatctgttgacctcgtgatctgcccgcctcggcctcccaaagtgctgggtttacaggcgagagtcactgcgactggccaattatttgtatttttagtagagacggggtttcgccatgttggccaggctggtctcgatttcctgacctcgtgatccgcccgcctcggcctcccacagtgctggggttacaggcgtgagccactgtggcaagcctggtgaacatgttttgttgtcaaattgctacatgagggaaacgttttctgaatttctgtcactctgcggcagagtccaaagccccaggggcgagagtcacgctgcggagactcctgtccacaggtgggattcttctgggagagctcctgttaaattctgattcccagccaggaaatttggtttcttcacttggggtgggggcccaggaagctggcagaataggctcccttagtgattctggtgcaggttcctggggaaccttactcagaggcatcagtgtaactttctcctggttttcccagtgtgtgagtggtcaaggcagtgcgggctaaagggcagcaggggcgtggtggaggcagtggcggacaaagagccactgctccgtgctctgctccacgcggggccactgctcacctgctgtgcacttgaggtcccttcctggaggtcctcacaccaagccttggtaagtgaggggtgaacaggtgatgattggaaactggatcccaggttctggctgggtgtggggtgatgatgaacttggtctgagcaggggtcccatgagagtaaaagacagccccatgcggttgtggcgggggtggggttgcgaggcatgggggatggaagctggggctggggggactgtggtccctgggaactggccttgcttcctggactgtctttgtgcaccaacctcgtctgcgtcccctcctagcctgggagctgcacgtgacagcaggtcccgcctgctgtgtattcccggctccagcccagtgcctggctcccagcacattctcaaataacagaagtggaattgcagtgggaggtcgtggcctagtggaggtggaggacttgggaagatacgcatcttcatcttctctgtagacccgggagttctcctgagcattagtctcagaatcgacttgggaatttgccaataggcagagccttggccaacaatatgtagcaattatgtaaaatcacacacgcacacacatgcacgtgaacacgtgcacacacacacacaaacacaccaggatttttttggtaagctttttcatttggaataattgtagattcacatgcagttatcagaaataacacagtaggctgggcatggtggctcatgcctgtaatcccagcactttgggaggccaaggcgggaggatcacctgaggtcgagagtttgagaccagcctgaccaacatggagaaaccccatctctactgaaaatacaaaattagctgggcgtggtggcacgtgcctctaatcccagctactcaggaggctgaggcaggagaatcgcttgaacctgggaggcggaggttgcggtgagccgagattgcaccactgcactccagcctgggcaacaagagtgaaactccgtctcaaaaaaaaaaaaaaaatagaactaacacagtgatcccacatacccttttccccatttcccccaatggtaacatcttgcagaactgtactacaatgccccagcaaggatagcgaggatactggcatagggatcgccaagacacccaggctttccatcgccacaagggtctcggtgtcacctgtttacagccacacccaccagccctccatcctctcctgagccccgtggtgggatgggctgttttctcttagcataattctctggaaatccatccgggctgcggtgtcaagagccccttccttccttccttccttccttccttccttccttccttccttccttccttcctccttccctccctccctcattcccttcctctctctctctctttctctctttctttttgaaacagagtgtcactctgtcacccaggctggaatgcagtggcgctatctcagctcactgcaacctctgtctcccgggttcaagtgattctcctgcctcagcctcccaagtagctgggactacaggcacccaccaccacacccggctaatttttgtagttttagtagagatggggttttgccatattggccaggctggtctcgaactcctgaccttaaatgatccgcccgcctcggcctcccaaagtgctgggattacaggcgtgaggcaccgtgcctggccaagagctcattcatttctttgttgagtgatattccagggtgtggaggtaccacagtgtctttgaccattcacccactgaaaggcatctgggttctttctgctttcagctcttatgaacagagctgctgtgtacattgatgttcaggattttgtgtgaacataaatctttgctctgggacaaatgcctaggaatacaattgcagggctgtttagtagttacaagtttaatttttttttttttttttttttttgagatgaagtctcactccgtcacccaggctgcagtgcagtggcgcgatctccactcactacaaccttcgcctcccaagttcaagtgattctcctttctcagcctcctgagtagctgggattacaggcatgcaccaccatgccgtgctaatttttgtatttttagtagagatggggtttctccaatatgtttaatttttaaagaaactgccaaactatcttctggagaggttgtgtcattttacattcccaccagtaacacacaagtaattcggtttctccacatccttgccaacatttggtttcatgactattttttactttaaccatcctgataggcgtgtgctggtatctcactgtgttttttagtttgcattttcctgaccactgatgatgttgaacatcttttcacgtgcttatttgccatctgtataacctctctagtgaaatgtctgttcatgtctttagctcactttccaattgaattgtttgttttttcacctttgagctttaagcattctttacatattttagatactagcccttggtttgatatctgtggtttacagaaatcttcttccagtctgtactttgtcttttcatacctaaacagggttttgttatttgtagcttcatgcttttgaatgacttccaacttacaaaaaagtggttagaattgtacaaagagctgctagatcccagtcacccagaatcgccaagcgttcatattttaccacctttttaaattctctgtttttgtttttttgcttgtttgttttgttttttttttttacggagtcttgctctgtggcccaggctggagtgcagtggcgcgatctcggctcactgcaacctctgcctcctggttcaagcgattctcctgcctcagccttctgagtagctgggactacaggcgccgtcaccacccccggctaattttttgtatttttagtagagacagggtttcaccatattagccaggctggtctctaactcctgaccttgtaatctgcccacctctgcctcccaaagtgctgggattacaggcgtgagccaccgtgccaggcccactttttttttttttgagatggactttcacttttgtcacccaggatggagtacagtggcatagtctcggctcactgcaacctctgcctcccgggttcaagtgattctcctgcctcagcctcctgagccactgggattacaggtgcctaccaccatgtccagctaattttttgtatttttagtagagacagggtgtcaccatgttagccaggctggtctctaactactgacctcagctgatcccacctgcctcagcctccaaaagtgctgggattacaggtgtgagccaccatgcccagccatgccaaatggaagttttctaattccattattccttctgctgcaccccccatttatgtataaatttttctaggtttcgccagagggaagccccttgagccatctcttgccttttgacacatctccatcttttatttatttatttattttttatttttatttatttttattttttgaggtgcgttgcccaggctggagtgcagtggcacgatctcggctcgctgcaagctccgcctcccggcttcacaccattcttctgcctcagcctcccgagtagctgggactacaggcacccaccaccacgcccagctaattttttatatttttagtagagatggggtttcaccgtgttagccaggatcgtctcgatctcctgacttcatgatccacccgcctcggcctcccaaagtgctgggattgcaggcgtgagccaccgcacccggcctcttttatttatttattttaagatggtctcactctgttgcccaggctggagtgcagtggtgcagtcttggctcattgcagcctcgactgccccagctcaagcgatcctcctgcttcagcctcccgagtacctgggaccacagacatgtgacactgatatggtttggctgtgtccccacgcaaatctcatcttgaattgtagttcccataattcccctgcatggagggaaggacccagtgggaggaattgaatcatggggttgggtctttcctgtgctgttttcatgaggtagtaaataagtctcacgagatctgatggttttataaaggggagttcccctgcacacgctctctgcctgcctccatgtgagacgagactttgctcctccttcaccttccaccacgattgtgaggcctccccagccatgtggaactgtgagtccattaaacctctttcctttataagttacccagactcaggtatgtctttattagcagcgtaataacagactaatacagaccgtgctcagctaattttctgtgtgtgtttgtttgtagagacggggttttgccatgttggctaggctgttctcaaattcctgggctcaagcaatcttcccaccttggcctcccaaagtgctgggattacaggcatgagccaccacgcccagcctgtttccttgggtgcttcctgactttctggcacaacaggatatcccaggctcatctcaaacattccctgccccagccctggatgtagccttctctccaaagaacccctgttcctgttagtgggaaacggaatttagatctgggcagggcaccgggtgtgcacatgactactgagacttcattgtttctgggtccttctgacaggcagagctaggaactgtgcacacacacacacacacacacgcctctacctcgctatatccatctactatatgaaaaagcatgaagccgggcatggtggctcatgcttgtagtccaagccactcaggaggctgaggagggaggatcagttgagcccaggagttggaggttacagtgagccttgatcctgccactgcaccccagcatgggcaacaagagtgagacccttaaaaaaaaaagagagagagagagactgggtgcagtggctcataactgtaatcccagaactttgggaggacgaggcaggcagatcacaaggtcaggagtttgagaccagccctggccaacgtggtgaaaccccgcctctactaaaaatccaaaaattagctgggcgtggtggcgcatgcctgtaatcccagctactcaggagactgaggcaggagaatctcttgaatcgggaggcggaggttgcagtgagctgagatcacgccattgcactatagcctgagtgacacagtaagactccgtctcaaaaaaaaaagaaaaagaaaagccacacgcattcgcaccaatactgtaactgtagtccagcaccagagagctgactccagcctcctcctttccatgtctggttaggaccctcatccccactgaccaacacagccaggcgcctccttctttgtgacccccctcgcccatgggaagaagcggctccacctccccaggatgcctcctccctgctcccctgatcgcatgccttgctccccgacctcctatctctcctcccaccatgcaaggtgctagctggttccttggctcctactaaagggaagggaagggaaaacgggagggggtcgtatgcatgtcctgcggctgccgtaccaaaccaccacaaactgagggcttcaaacaacagaaatttggccggacgaggtggctcacgcctataatcccagcactttgggaggccgagtcgggtggatcacctgaggtcaagagttcgtgaccagcctgaccaacatggagaaaccccatctctactagacatacaaaaaatgagctgcgcgtggtggcgtatgcctgtaatcccagctgctcaggaggctgaagcaggagaatcacttgaacctgggaaggaggttgtggtgagctgagattgcgccattgcactccagcctgggtgacagagcgagactccgtctccaaaaaaccaaaaaaaccacaacagaaattcattttcttgtggctctagaggcctgaagcctgaggccaagatgtcggcagggctggttctgtctgaggctctgcaggagaacctggcccaggcctctcccccagctcctggtggctcccagcgacccttgtggacgccactcccatctctgactccatcttcacgcagccttctctcccctccaagtgtccctgtgtgaaaatgtccctctataaggatgagagtcactggatcagggccttggtaataaaacgaaattctcttccagttcagctgccaacacagccgcaggcaggttctctcatcttcactcggtcacatctgcaaagaccctgtttccaaataaggccgcagtctcaggcgctggggatcaggacttcagtgtacctcttggggggacccagggccggtccacagcgggtggaaccgcatctgtaacaggcccaaggtgcttcctcctgcaccatcaatcccagacacctgggtgtggtgtctgagttcaacagccagggaggggcctggacctgcacgggggcagccaggacaggggctgtgttggggacaggaggggctgctggcagcgccacagacacaggacagggcaggggtgcaggagccctgcccagggatgataccccctcacctcgtgacagctaggggacactggcttggggaccctttcacgacaccaccagcctccagcctcagccccaagagaggctcctgtcttgcttcttctgacctcagcaccgcagtggcctgaggtctcgggtccaacaggctgggaaggccagagcggctcttcctgggctgcccaggaggtctgcgagggggcttcccccagtcccagcgctgcccgcagtgtgagctgagtaaccctgagtgagagccaagagctcccaggctcagttccttcatatccagtgaaggggttgaccagaggcccccacctgaacgggcacctgcaggcgcccctgcctggaggccgccgtcccagctctgccgcagcgtggggccatttagaaacctgtgctgggcttacaacttaaagcagcggtccccaacctgtttggcacccaggatgggtttcgtgaaaggcaatctttccatgggcagtgagggtggtggtggtttcgggatgaaactgtttcacctcagatcatcaggcattagagtctcataagaagggtgcagcccagatccctcacacacgcagttcacaatagggttctcaggttccgcgcctatgagaatccaacgccaccgctgatctgacgggaggcggagctcaggcggggacgcttactcacccgcagctcacttgctgacgtgcagtccggttcctaacaggacaccaacaggtccgtggcccaggggttggggacccctgacttaaaggacactccccggcccgataagcaccatcgctgagcacaggctggcacggaggccagggagggctgccccctgggtgttgctaagcacgccgccccaggagggaaccggctctggaagctgctctcacagcagggtcagctgggatgctgtcgggttttagcaggactgggtcaaagctggcgtctggaactcagaagggaaatcagacattgccgggccaatcatggaagcggcctctccccagagagctggggaaattgaggcccagagagatgtgtggagtcactggtgggacgtgaccacctgcctgtgtctgctccagaccagcccccgtctctgccccgggcatggttctgtttggggccagaaagacacgggcctggagctcaggggaaaggctggaaagggccttggtcctcccagcagagtggacgcttatctccaccggagcgcacagaggctggacgcacaccgccctctgtgctcacgggttcatttgtttgatgaatttgtcataacttgaaaggctctggtttatatgctaacttcctgttccagttcagtgccaacataaccacaggcaggttaattgcgtgtccatcaacacgcctggggagcgagccaagccctccctcccgccttcatggccacagagtcctgctgccagagcgctccaacccgtgggcaggggctgtggtgagtgccagccccacaggaaaccccgtgtgccaggtgccacagccaggcctgccctgggctgcaggccccccgttcttcagtccttcctgtgaagtcgtccagctgggggtgggaagggaggtgcctgtgactgctggagagactcatccagccaccctcaaccaataaaatgctcttcacccagcaattctacttccagggatctctcccaccaccgagtcccaccagggtgccacgatgtagaggcaggacatttgtgggaaggtgccggcggctcctggggctggacacaggctaaatgcctgggagggggcggctgggtaagggagaggtgagccgaggccatgcagcctggtagccatcgagaagaaggagattacgtggacaagtggttaaagactttctaggtgctgctccgggacaaaggtgaggtgccacccccatgctgtgtgtgggactttgctaaaaccagatgggaggggaatggtgcctggagggtccctgcactgtataaccttctatgcctttgaggtgtaaaagcagtgttgttttaccttcctaaactgctgtcacaaatttctacaaagttgttcatgtaaaacaacaaaattccattctctcacaggcctggaggccgcaagtccagaatcaaggtgcctgagggccgtgttccctctggaggcgcccggggaggcggggttgggggaatccttcctggtctcttccagcttctgggggccacaggtgctcctggacttgcagccccgcatggctccagcctctgcctccacctccacgcgccttctccgctctgggtctcagtcatcctctggctttccctttctccgatgcctaagtgtcatcggatttagggcccagcctaagttcaggatgacctcatctggaaattagatgtcaatcagaagctggaggttcatggggcccccactctatgaatgcagggtctatgtcccggaaggaggtgacagtccaagcaggacctggacgtctggacacctgggaacccaggcgtctgaacacttggagcctggacatctggacgctaggacacctagacacccccacaatgcccctttccccaagcccaggcttccccaactggcctcgagtccagggcccacaacgaggagcgggtggtggtaagaaggaaggtggtggaaaccaccactgaggcatcgatgtgtatttgagacctcagaaccaagtgcagccgagcgcgtggaccatgcagagaccagccggccaggccattggtcccagactgcacccctggggaggccccgcccacctcgtgtggcactttcccacgtggcaaccccaaagccagcaggtgcagtgtttgagtcaggctgcctgggctctgtccacagctggggggccttggacgagggacctctggtgctcatttggacagcagcatcatggtggctgcctcagggctggtgggattacctagcaggacagcccagggctcacctttctttctttcttttttttttttttgagacggactctcactctgtcacccaggctggagtgcagtggtgcgatctcagctccctgcaagctccgcctcccaggttcatgccattctcctgcctcaacctcctgagtagctgggactacaggcgcccgccaccacgcctggctaattttttctatttttagtagagacggggtttcaccgtgttggccaggatggtctccatctcctcacctcatgatctgcccgcctcagcctcccaaagtgctgggattacaggcgtgagcccccgtgcccagcctccttttttttttttttttttggagatggaatctcgctctgtcacccagactggatggagtgcagcggcgcgatctcgcctcccgggtttaagcaattctcctgcctcagccttcctagtagctgggattacaggcgtgcaccaccacgcctggctaatttttgtatttttagtagagatggggtttcaccatgttggcccaggctagtctccaactcctgacctcaagtgatccaccctccttggcctcccaaagtgctgggattacaggcgtgagccaccacgcccgtccaagccacctttcaacagacggccccggtggccgttctcaggtgggactgatctggtcctgctgctgccttcactgagcagcatcgggagaaccaggtggccgctgtccaggctctgcgctcccggccctgctgggtctgctctggagttcagggctcgtgatggtgtcccagtgtgtaggtctgcagaacgaggtggtgcaggaagggtgggccctgggtcccaccgaccaaggctctgggacttccttctccatgttggacgcaggctcaggctggagctctgtgatgcaccggtgccctgctgggggtggacagggagcacagagccccaaggtccaggggcagctctgctctctgtgcccagtgggcccatggcagccttagcggggaggcagggtacagaggggtggcagaggaccctcgccagagcccaaggtccctcgcgcccccaggccttctctggggagaccaggaggcttggaggtcctggggcagctgtgagccctttctgggctggctcttcacatgcacagccttgctctggagcttcccggccatgatctgccttcacagaaaccctggggggccggatgagaaggctccagagaaacgggccgtcgaggagctcgcatccagatgggggtccctcggccgacttggcgaggacacacaaaacacaagagaaatgcccagagggtgtgtcttgtggtccccagcatgggcctggtggacctcagtgagcccttctttgaccctggcgtggtggccgccagtgcctcctcatggctggccctgctcccggtcactgctgggcaccgatgaccccctcattctcccaggcaccccctgagagagactcatgtgagtccaattttcttctttctttgtttttttgagatagggtctcactctgttgtccaggctggactgctatggtgagatcagcgtttaatgctgcctcaacctcctgggctcaagcggtcctcccgcctcagcctctggaatagctggaactacaggtacgtgccaccacactcagataattttttgtttttattttgtagagatgggggcattacattgcccaagctggtcttgaacttctaagctcaagcaatcctcctgcctcggtctctcaaaatgctgggattacaggcatgtgccaccgtgcccggcttagtctgattttctttttttttttgagacagtctcactctgtcgcccaggctggagtgcaatggcgatctcagctcaccacaacttccaccacccaggttcaggtgattcttctgcctcagcctcctgagtagctgggactacaggcacctgccaccacgcctggctaatttttgtatttttagtagagacagggtttcaccatcttggccaggctggtcttgaactcctgacctcatgatctgcctgctttggcctccacagtgctgggataacaggcgtgagccacccctcctggccaagtctgattttcaaatgaggctcagcagggccgggagctacctggtcacccaagggcacaggcagatctgggagaaggtggtttcctgtggggtcccgggacctgttgcagacagagcctctagccctgctcctggggagcctcgctctagatacctggggaagtcgctgagcctcagttcctgggcccctggtccctgacaccccagagcctgcctggcctccgaccctcaagcctcttaccctttcttttcctcaaggctcctctcctgttttctaaaccttctccttcaaaacaaaccctctcaaggctgggtcccagagcaaagatcctcagggttggccaggcgcggtggctcatgcctgtaatcccagcactttgggaggccaaggtgggtagatcacctgaggtcaggagttcaagaccagcctggccaacatggtgaaaccccgtctctactaaaaatacaaaaattagccggggatggtggcacatacctgtaatcccagctactcgggaggctgagcaggagaatcacttaaacccgggaagcggaggttgtggtgagccgagattgtgccactgcactccagtctggtgacagagcgagactctatctgaaaaaaaaaaaaaaaaatcctcagggtgcccgggaacctactggagccagggacagacacatctggatggaaactgcagtgccctatggggtcaggcacatgctagaggcagccaggtcctaggggaagaggaaggagaggtggtgctggcctagggggcaggggtgcgggggacagggctaagccagccatctctgccagaagcaggcagcccttcctgaaatggactttgagagtttgtgatatcataattgacgtcgctgcctgccagagtcaggaaccggcccagagtgtcatccatccccttcactccagcctgactcagaaggtggaattgtgccccccaaatatgtccaagtcctggtgccctcatatctgtgaatgtgaccttatctagaaatagggtcagccgggcgtggtggctcacgcctgtaatcccagcactttgggaggctgagaccggcggatcacctgaggttgggagtctgagaccagctggaccgacatggagaaaccccctctctactaaaaatacaaaaaattagctgggcgtggtggcgcatgcctgtaatcccagctactcgggctgaggcaggagaatcacttgaacccaggaggcagaggttgcggtgagctgagatcacgccattgcactccagcctgggcaacaagagcaaaactccacctcaaaaaaaaaaaaaaaaagaaagaaagaaagaaaaagaaatatggtctttgcagctataatcaagctaagatgaagtcagactggagtagagtgggccctaatccagtgcctggtgtccttctaagagtgagacactgaggacgggcgcggtggatcacacctgtaaatcccagcactttgggaggctgaggcgggcggatcacgaggtcaagagattgagaccatcctggccaacatggtgaaaccccgtctctactaaaaatacaaaaattagctgggcatggtggtgtgcacctgcactcccagttattcagggggctgaggcaggagaatcacttgaaccctgcaggcggagattgcagtgagccgagatcgtgccactgcactccagcctgggtgacagagcaaggctccgtctcaaaaaaaaaaaaaaaaaagacactgagacagtcccaatgccaatgagccgtgcacttaaaaattgttaaaatggtagattatatatataaccacaattcaaaaaataaccagataaaattttaggagcctgaagttatggggcgtgtatacagtgagggaccgcaccgcccgccggcagctttcatctgtcaactcctagtgagaagaacactcacccaccaaaaaaaggaaaaattgaaaatggtgctgatttcgagggtaagtgctagcttgcttgcagggcatttgaatatatgaagtcaaatggacaaattcaaacctgggtcttgttaccaggcaagttactgaaatacttcattcagtttcgcacctgacaatatacaattttagaaagaatatgtatacaaaaaaagagtgaggcagagattggagaccacctgaagctgggacagaggcctcgacaggcctccccgcagagcctccagaaggatccacaccaccgcacgtcggtggccagcttctggcctctcaatccataagaaaagagcttcctgccattgaagcgcccagtctgtggccatctgttgcacagtcaaggacaccaaggcccagacccagctatgtgtgtgtcctggggaggcacagggtgagggggactctctgctcccagggtcggtgcttggggggggtctcccaggagcgggatggggcagggctcctccagtgcaggctgggaggcctcaggggatccacccgccaggaatgcccatgggcccagaaggcacagggtgggggttccctaaactctctggaggctggggctgggggaacaggctgttccagcaaggggccctgaggctgtggccacacacgggctgggagggatccggcctgtgcctgggcacttagcctgagtgtgggggggaccagggcctgtgcaggtcacgtggcctccacggtgtcagctccaagggacactgctcggcctcctcttagtcaacccagggacgactccttcctggtgggacctcccttcttgaggcttccaggaggcactcctgtgtctctggtctccgcttcccggcccctcctccctcctgaagctccatcctgtccccagcgtccctgagatgacctcacccacgccagtttcccattccatgctctgcggcaggctccggagtccacatctccaagccgagtaggcgtccctcacatgctcctgctcgaaccggccgcctgacctccttgagcccagcagatggccacgcagagccctgagttgcagtggaacctgctggccctctggcacccatctcattgaggggcccccccaccccaggagtacaggcctgtggctgtgttcctatgtggctttgctccccacacccacaagaacacgcacaacagatcctgggcgtcttcaaaattcaggcaatgtccagctcgggccttcccagccactcggctccctccccaacccagcacctcctccctggccctgcatcccctccacttggacctcctctggttccctccctgcaagcagcccaggctccaagccctccacgggccccccaaggcacagtcccagagccaaagtcttcccctcggccttccaggacctctggaatccagccactggctcgaaccctctgaccccatctctcctcccctccccatttcctgcccccactgaaggcccagtggcctcctttccttcctggaagccccagggcctttgtacctgacagtctcccagtcagaaatgccccccagtcagggcgcggtggctcacacctgtaatcccagcactttgggaggctgaagtaggtggatcacgaggtcaggagatagagaccatcctggctaacacggtgaaaccccgtctctaataaaaatgcaaaaattagctgggcgtggtggctggcgcctgtaatcccagctactcaggaagctgaggcaggagaattgcctgaacctgggaggcggaggttgcagtgagccgagattgcgccactgcactccagcctgggcaacagagagagactccgtctcaaaaaaaaaaaaaagaaaagaaaagaaaaagaaatgcccccagctgtatgcctcctcctcgcccgcagtactgtactccaaggtcaccttggctgccccgttgaacactgcagcccctcgagccgctatgcgcaccctcaacaacgcaggcgccagcgcttggcgtgtcccagctcctgtgcacccatgctggccctgtgtgcccatgtggtgactgaaccaggcggccagctgacccatggggtgccccttccctgagagctgcttccttcctcatccacagggtacttggagactggccccgggctgggcccctgtctggagcgccgaggcctgcctgtcggcctgggatgactgcagaggctgctgtcaaggaagctgtgctccatggtcaggacaagcaagccgacctaggggcccaagagaccaagatgagctctccaggccccacagcccggccctgagcctcctctgctgaagccagcccgtgcgctgacagcggtatggggcctgcatgattggcgcaggaataagcaaagagaccctggacccaagggcgggtccagaaagcggccccttccccacgccgatttataacaaaggcccctgcagagcagggggaagaggtggcctttccctgccacgtgtccagtatcagttggacactgacagaaaaaagtgaccccatccccacaattaatttaaaatgagtcacagagcaggctgggcacggtggctcacacctgtaatcccagcactttgggaggctgaggcgggcggatcacttcaggccaggagttcaagaccagcctggccaacatggtgacaccctgtctctactaaaaatacataacttagccgggcgtggtggcacactcctgtaatcccagctactcgggaggctgaagcacaagaattgtttgaacccaggaggcagagggtgcagtgagctgaaattgcaccaccgcactccagcctgggtgacagagggagactctgtctcaaaaaataatactaataaatgaaataagtcatagaacaaagtgtgaaaaataagccccaaagcttctagaataaaacatagcaaaatctcttcaagacactgtggtcaggccaggcacagtggctcacacctgtcatcccagcactttgggaggccgaggtgggcggatcacctgaggtcaggagtttgagaccagcctggccaacatggtgaaaccctgtctctactaaaaatataaaaattagctgggtatggtggcgcatgcctgtaatcccagctactcgggaggctgaggcaggagaatcacctgaacctgggaggcggaggttgcagtgagctgaaatggcgccactgcactccagcctgggcgacaaagcgagactccgtctcaaaagaaaaagaagaagacactgtggtcagcaaagatttctaacatagaacacaaagggactcgacataaaagactgggcttccttaaaatcaacaactttgagacaccatcaagagagtcaaaaggtaagttgcagacaaatgtaccgttcgcctcggtgtgtcttaatagattctacaccaaggccttctgcccagaatatatcaagaactcctacaaattgataagaaaaagataaacaaaccaatttttaaaatgggcaatacacttgaacaagtacttcacagacctgaagtgcattgaaagggctaaatgcagtgaaaaactggtcagcctcattagtcaccagcgaaataagcatttaaaccataatgagatgccacttcatgccttcacaaaggctaaaactacagaatgacttttctttatttattttttctttttttggagacagagtctcattctgttgcccaggctggagtgcagtggcgcgatctcggctcgctgcaaactctgcctcctgggttcaaacgattctcctgcctcagcccccaagtagctggaattacaggcacgcaccaccacgcctggctaatttttgcatttttaatagagacggggtttaaccatgttggccaggctggtcttgaactcttgatctcaggtaatccacccactatggcctcccaaagtgctggggttacaggtttgagcctctgtgcccggcccggccaaagactgcctattctaaacgttgctgaggacgtggaacaatcacagctctcctctctttccagtgggagtttaacatggcacaaccgcctgaaaaccgtttggtgatttctgtgaattcctatgccttctctatgacccagcaattccactcctggatggagttaacctgtgatggttaattttctgtgtcaacttgtctggggcacggggtgcccagatatttggtcagcataatttgggctatttctttgagggtgtttctgcatgagatgacccggtgctctgagtgacgctgactgccctccccagtgtggtctggccccatgcactcagctgaggaaatactaggatagaataagaagtcccaggagtcagagggccagctctcccagggtctcaagcctgccagctttcagcctggagtggtggtatcaccctcaggggtctccagggtgccaaccgtggctctcgggacttgtcagcctccatcatcacaggagcagattccttctcatcgatctttttctccagatacagagatgggtgtgtcccctgctggctctggttctttggagaccccggctaacacacacctgagacggagaagggcttctgtgaccaagggacacaaacaggaacctgccgagcagagttcctcatcacagcccttgtgtgtttctttagggatgccgtaacaaagttccccagtcaggtggcctaaagcaacaccattgcattctctcacagtctgtaaagccaaggcctggaatcaaggcgtgggcaggattggctccttctgaaggctctgagggaaaatccttccggcacctctccccagcttctggggacagcagcaatgccccccgggtatctgtgtctagtctccctccacctcgctcttctaaggacacctgtcgttggatttaggacccacccaactccaagataatctttgtaaatgtcattaattaatttgtaaatgtcacctgagaccaagagttcacgaccagcctggccaacatggtaaaaccccgtctctactaaaaatgcaaaaattagcctggcatggtggtgcatgcctgtagttccagctacttgggagcctgaggcaggagaatcgtttgaacccaggaggcagagtttgcagtgtgctgagatcgcgccactgcactccagcctgggcaacagagtgagactctgtctccaaaaaaagaataaataaataaataacagtctgtaattaaatgtcattaattaatgacatttacaaagattatttttccgaagaagttccctttcataggatctgggtggacacatattttgggtgccaccattcaacaagccccaaaccagaaataacccaaatgtccatcagtgggaggctgggtcagcgtgcgtggtttattcctacaacggaatataattcagcaacaaagaggagccactgatgcacgtggcaactcggatgaatctcccaggcatgacgccgaactcaagcagcaagataggaccaaggcctgaggaaggcgaagctgccaggtgggcctcagcagcggaccctggtcagggcttggagtgccggttgaagacccaagggctgcacgagaatctcatgggtgagaacgcgttgagctgcagcccaaagatgggagcatttatttatttatttatttatttttgagatggagtcttgctctgtcacccaggctggagtgcagtggcacaatctcggctcactgcaacctccgcctcctgggttcaagcaattctcctgcctcagcctcctgactagctgggattacgggcatgtgccaccacggccagctaatttttttcaccatattggccaggctggtcttgaactcctgaccttgtgatctgcccgccttggcctcccaaagtactggattaccggcatgagccactgcgccagtaagtggctgatgggagcattttaccgcctggatgttgtaccttgactgaaaagggaaccccaaccaagccctgaagctggggcgggtgcaatttgagtttggggagggtgggagcaggtgctggtggggctgggggagttgggggggctgggggagtcgggggatctgggagagtcggtggggctgggggattccgggggcgctgggggagtcaggcactcactccacatctctaagcatcagtttctccatctgtcaaatgggcgagtgagccccgcctcagataccgcagagagtgccaagccaggcaacttctggggggcttaacgagcgttcgtcttagtccatctgccccgtgggcagagcccactccacagggagggagccaggctggcctcgtggcaggaggctggaagcagcacttgcaggtgtgtgcatgagcaggccagtgtgtgctgacgcacgtgtgtgttcacatgagcacatgcataaatatctcaggtgaaattaacatcgggaagagtccaccagaaatgaaataatgcacatggactggctcagtatttttttttttttcagatggagttttgttcttgttgcccaggctggagtgcaatggtgtggtctcggctcaccgcagcctctgcctccctggttcaagtgattctcctgcctcggccacccaagtagctgggattacaggtgcccgcaataacatccagctaattttttgtatttttagtagagatggggtttctccatgttggtcaggctggtctcaaactcctgacctcaggtgatccgcccacctcggcctcccaaagtactgggattacaggcatgatccaccacgccgggccctggtctttttttttttttttttaagagagagtttgctctgtcacccaggctggagtgtaggtggcacgatctcggctcactgcagcctccacttcccaggttcaagcaattctcccacctcagcctcccgagtagctgggattacaggcgcccaccaccatgcctgactaatttttgtatttcagggtttcaccatgttggccaggctgatctcgaactcctgacctcaggtgatccacctgcctcggcctcccaaagtactaggattacaagtgtgagccaccgtgccctgccaagactgttttgatgtcagaaaaaatactgaatgccacaatctgggctcatggtgtgtgggcggctacacatcagggttcagcatgtatgttgaggggtctgccttggcccctctattcctgggcccaagcagatggggtagcaggtggggaggggtctcagttgtctgggtgggctttctggcccaccccactctccccctcacccaggatggggcgtcctgctgggtcagggagtctcagggctcccaggcagtctgaacgctggaacttgggcatcactgcactgggtcccctccccagggtgcagcaggccctacatcatagggcacacccaccctacctccccttcaatcccactcagtcaggccaggccctgcccaggccccttggggctgcagtttctcagggaacagcactgcccagagcgcctcccctacggcagccactgcccaccccgccctaggcatccctctctgcggccccgcaggggcatgagagtggcagcatggcggcaggctccctgtgcagtgtgcttcctgccagggaactcgtcagcctcctgctggtgtcacacatccctgaccctccctcagggtcctcccaggtttcccaggcccggggcagggggcagagcagcaggagacaggagtggtgatccaccaggcaaggggctgggctggtgaaggcatcctctgggatccctggccaggctggggccaggaatgggagaggctcggggggatgctggggcagagcccaggagctggaggggaagcaggcggggagagagcagagccccgctgaagggagccacagtgagccctgggcacaggtgggacaggcctcgagtcctccttggccaggagactcccaggaaggatggcacgaaggcaggggtgggccgccaggagcctgcggagcccgtccacatctgccaggcaccgcctgtacgacaggccagctcccagcgtggttgaggtcccaggtccctccggcgcccagcaatgcccgggtcccagacaggacaagttcctgcctccctcttaccagcaggacctgccgggcatctgagctgcctggggtgtcacaggtgagccagcagtggcgggtgggaagtgacgtgtcatgggtgaacagcagtggagggtggagctgttgagccagtcctgggcggcgtatggctggataggaggtgtcccaggccacacttcgaaaaggacaaatggactaggtcgctgccctggacccataacatgcacctggctgtgccccccgctccccccacaccccgctccctacccctccaccccctgctcccccccactccccacacccacacccctccgctccccccccgcctcccctcacatcctccccactagcccccatccccctggctcccccccccgctccccccacccccaccgctgcctcccatcctcccgctccactcccccgctccccccactctcccatcccccccgctctccccccactcccactactccccacccccactccccacccgccctgccccaggcaagcctcaggggtggtggctgttgactgcaggagcagagccagaacagctggcggagaccaaacctggtcatccttcacaggctgtgtggccatgggcaagtcactctacctctctgggtcccggtctccacattttcagagtgagggcagtttctctgtgccctgaaagtggctgggagtctaggccaggtgacagctcagggcaagttctcaagggccccagaagcatctggggtgcaggggaggttccaggatccccagttcccacctttaaatgaggtgactcgagaccctctgagatgaagggaccctgaacgttgatcattttgacctcccatctctaggagcatgtccagagtctgccattccttccagaaaggaaaaaggagaactcacatcaagatctcccttgtttagccagggaggtgggagtggggccggggggcagccaggaaacatgagcacgttcgtcatggagggcaggggctgcacgggcggccaggcagtgtgagcccatggtcagcaccagcggcgagctgtcatctccctgtgcctcagttcccttccctgtaaaacagaactctgcaccgcccccgaccccatgccaaggtgctgggcaaagctgcaaaggtgctggtgcccggccaccctcagtcaaggcggcaagaacccctcggtgagtggacgtggccccacagggatgtagaggatgaggcagaacccagggctccccgagttccaagtccacgctcccctgcacacgggcccaccgccgccctttccagagagaaaaagaaatttctgtctaaagtcagtcagaacacccccagactccacactggtgacgtccgaatccccccggacaccggtgtggcctcagtccttcctcccagctggttcgctcagctcttgctccctgccagcccccaggtcctggtccttctgccacaggctagcaggcaccccacagcccgatggcggctcagatggagactgcggtactggatatcctgggggtaacatcacagccacaccctccgccaggctggggacagctgcccatgggccgggccaggccagtgctgggattatgtctggggccacccaacaaaagaccacaaatggggcagctgcaaacaacagaagtctattttctccgagtcctggtggccggaaccaaaatcaagctatcggcaggactgtcctctctctgcaggctgcaggggaggttcttcccgcctcttctggcatttggtggccccaggtgtcccgtggacgtggccgtgtcattcccatctctgcctcatcttcacgtggcctctgtcgcctccctctcaaatctcccccgacctctgtcttctaagggcctttgtctctggacaaagacccttttcccaaataagcctgtcgtgttcacaggctccaggtggaccgatcatttgggggccaccactgtgcccactgcagtggagtcggggacggggccactcatggccatgaggccacaaacgggtgtggggtctgagagcagcaggcaggtcacccaacaccagacaggagcaagcccaagcaggggtggccgagagagccgggagggtgatcgggtgaaacgcctgccctcagaggaagagacgggacatggcccacggcggggtctcacctgcggcctctggttctccccgtgctttggcgccgctcccgctccatcctgtcccttcactcccctgttggagagggttttcccacaatggcctggacatggagggctcgggaggtgggtgaccttcccagtgtgcccagctggaactggtcgacttgggcccaggtccatgtgagtcccgggccccgctgcctcctgagaccaaggagcatttccctctctggcgatgggcacgggagctcctggcaggacggcgaccgtccggtgggcccggagaggaggcagctgctgcaccctcggcgctggctctcagggatggctgggctgttaggcccgaactagacctgctgccgccgtgtggagaagaggtggccccaggagcccactgtctcgggtgtgggccatctccatgcctgttcctgtccccatcacacaccaggcagtccccaccagcgcccacatcctcaccagggctctccacgtcccctcctctggtccccacccatgtgtcagctcctcacagttccaaggggccacccagcatccccggggcccaagcccttagaggatgtggtctgggagggtgggacagacacttcttccccaagtctgcctctgatgtgtcacccaaacctttaaactttgcacctcagttttatttatttatttatttttattttttttgagacagactcgctctgtcgcccaggctgcaggctgtggggtgtggcgtgatctcagctcactgcaacctccgcctcccaggttcaagcgattctcctgcctcagcctcctgagtagctgggattacaggtgtgcggcaccacatccagctaatttttgtatttttagtagagatggggtttcaccacgttggccaggctggcctcgaactcctgacctcaggtcatacacccgccttagcctcccaaagtgctgggattacaggcatgagccaatgcacctggtgggacctcaggtctataatgatctaaatcacccaacaggaggaggcagcaagacctggcagcgagggccaagcaggaaggccatctgcctgccccctgcctgtcccctccccacccccagctctcccaggcactacagcctggggcagcccctcccccagggccccaccctcagcctcctgtgcaggtgagcaggagcgggcagcctcactggagcccagatgacggagccggagcccctgccccaccccacctgcatttgaggggtgggatctgcttctggccatgagggaggacagacccccacactctacaaagcctgccccttggctgcttggctgtctgggccaattctggttgtcctgaaccagaggccaccaacgggccccgtggaggctcagaaccaaaatcccacattctcagaggttcttggggtcctcagggttgggtagtgcagcagcgtgcaggctgggagggaagcctgggatcaaatcctggctccccttcttcccgtttggtggccttgacggagagtgagggcttcctggtgactgagcctcgctttcctcgtgtgtcctgggctcggagaagtcctttctggaggaaggagggtcccttcctcttggtcagggcgggaagaaatgtgccccaaggagggatggcagcgcccactgcgcccctttcctcctccccccaccccgggctcctcctctgattccgttttggggactctttcctgcccctcagagtctgaggcttctaggcctgcgctgttcataccttgaccccaccccagcccccatgttcgcaagcctgtgtcccctggagcctcttgtcacagaggaccctctcctgtggagtcccagggctccactcgcccccatggggtttccagcttgcagcctggggtcctgggacgggtgcagggaggcaagtggcccccagcccacggagccccatcatgcagaaaattcggcaaaacccagcttcctccgagtgaggcggctgtcccagggcaagctcggggagggcactgttgccccgctgtcccttggccacggcagggttaggctgtagcatgggcaagactcagggacacagaaatcggaaggggagtctaaaagggggtccagccctgcccagcagcctcaccacctggtggcatcacccccacgctgggcgagctgccccctctccagggcagggctccaaaccgctctgggggaagctggcctcagctgggtgtcggggggcctgggcccatttgcctggacgctgcgggcaccctgcccctctggctccccggggtcctgggcctctcgcgggcaggaatgccatctgtgccatctgaccagggctcccctcactgtgcaccctggcgttttggggcgtgggaaggcgttcaaggctggtttctgtttccccgtcaagccctgagtggagtgcgaccggaggctggccagtggctccccgggcacctaggggaggctgggggcaaactgaggcagtctagagcctacaatcactccaggggcctgtggggcagggacagggctgaggggacctggcaccctgtgggttccccagcagtgtggctggggacatggggacagagcccaccttgcagcctctgatctctgggcctggacatttgtttggagtagtgttcactggtttgttttgttttcttttttttgagacagagtctctctctgttgcccaggctggagtgcagtggcgcgatctcagctcactgcaagctccgcctcctgggttcgagcgattctcgtgcctcagcctcccaagtagctggggctacaggtgcccaccaccacgcctggctaatttttgtattcttagtagagacggggtttcaccaagttggccaggctggtcttggactcctggcctcaggtgatccacccgcctcagcctcccaaagtgctgggattacaggtgtgaaccaccacgcctggcctgttttgttttctgattgcaaaatgaatacatttcaaaagggaaatttgaaaaatataaaaaatccttaaaaagagaataaaacccacccatcaacccatcatgctatacccaggaacactacctccagcttccaggacccccaacctcagccaagggtctccacatacttctctcttctgtaattgggtcttcccgcggaggctggggcctgggcggatggatgcccagggtgggggctacctcctctggactgccgagacctccccagcaatgaggtgccagaccaggaccggggtgaactcaccatgagcttctgttgccgtctgggcctgggctgggagcaggaatctctggggaaggccaagcatgtttcagagtcatcgggatcagggccaccctctccctcccccagtgtctgcagccattttcataggaaaaaaactgggtttaacaaagctgttccagacctcctgacctgaaactgatttctacccttccgtgtggccctaaggctcccaggcacgaggcgcatagctaggggaagacagtgcctctgacacccatttaagagttaactgaggccaaaaagccgctctgcacgcccctcttgttcagaggcccactgatcccctggtcccgtggtcaccacggggtatgggtgcagacaaagccgtgttcatggaagctccgggcctgatgacagtggcacaaggaccccattctctgctgtctccagctgcatcccctcccccagccggcctgacatcagagacagcgggtcagacatcccgggatcccccactcccaccccagggcgcaggctcagctgctggggctcagggaaatgcacaagagggcctgtgctggggagacagggcgtggatgaactgcctgagtggtgcagacagctgcagcttggcccagcaagtcttcagtgggaagctgcctgcatttttacaactgatttttgaacctgaaagtggaggttcacatccagcctgttcaacgtaatcttgttggttccagtccaacgtgaccttttggaatctggtttccagactcttgccatatattagcagttcctcccggctgcaggctgcgatctgccttgctggggcctcatcccagagaaacaggctggccgggagcattcggaggggcttcccaggaagagctggaccctgacacatctttccgtgggtgctgtggccaagacgcccaatggctggtcatgaggcccattttgttctgctcctggtctacaaggcagaagtcgggacgcatcatgtctgccccagccaggagtcttagggttgtcccaggcccaaaagtcagccaaccctagtactagttttccagaagaatccagagcctacgcacccaggccctcagtgtgaacaagggcacgttatttgctctcacagtctccttctgctcatctgtaaaatgggcatggccaccatgccctctgtgtcccaggctgtctagagggttgagcaggcagggtaggatctggtacccaccatgcccccgatgcccacgcaggccagagaggggagaaatggagttggctgaggcctggccctccaatgccctctctgggctctgaaccagggctccgtccgtcccctggggctgcctcccgcaggccagggctcctttatcctccccgttgagcacctggggcgcggggatgacagcctcatttccccaagcagcccccacagggctccctggattcctctctgacaagcacatgcgccggctctggtcttggctccgtgtgccccagcacgacagaacaagtgcggcaagacccaggcctgcagggcggcggcaagtgcccggaggggcggaggcgggggtagggggtatgccggcgcccggcagtgtcgctgtccccgcgccaccgaccccaccccggcgtgaccttccctgccgcgcgcccaaaggccagcaaagcaggcggcgcttttaaggacgcggcggcgcggcgggttcggtgccaggaggcgccggggggcggagggagggggcgctcgaggccagaggagcgacccccggcagccacccaggcgcgccccgctcgtcactcgctctcttctcccacttgcgccggccgggggcggggcgcggcggcgagggtgggggctgggcagccggggtcctccctcccccgctgtgctggaggcagcggggcgctccccggagctggggcgcggagggagggccgagggcgcgtcggagcctcatccggcctgggccctccgagcgggagcgacccgggtgcggggccccactctgcctggtcgccccgagcgcgtggaacgcgagccgaggttccgcccgaaatgcggccggcgaaggggtgcggtccgggcggggtcgcgcgcccccagcacgctgcctgggctctggaatctgggagaagcctccagcacgggctcccgagcgcacaaactcagggacgcccttcctcccgtccctggtcccctccccgaaaagcgagggggacgggcctggagggaaacggattcggtttcgctccgctctcgtcaattttctgtttaatgtcaccgggccccactgtgggagtaggaagcgcgtcacccgggccataaatttgcggtgatggcgcctccggccgcctccccagacggagggacagggccgactccggagcaggtggggccgccgagactcgacctccgcggtaggcgctgcgcggcttctcccgacgcgggtcccgggcgcgctcggccgcccctcccgccgcatccgcccgcgcccggccccgccgcgggatttccaaagggcttttgttccgggcttggatgtagaggctttgatttttttaccacccgcctcaggagactttttgcttggaaaagtcctgctattaaaacaaaaacaaaaaccaatcaattccggagggaagaaaatgcctccagtgtgtgtctgcgcttcccccgggccgaggacggtggtcggggctgcgtattgcccggaccccgggtaggggaggcgcagagacccggccctaatggacttcgctcggaaaggccccggcggaagtggccgggagagcgggcggctgcgtgggtctgggccctggcccggggcaggctcctctggcctgcctgccttggctgcttggaaagggatttctggggagtctccctttgggggcactttccccgaaactcctctcccgcctggggaattacccctgcagcgggtactgatgcttcatgaattgagatggaatacgtatttgttcaggccagaaaaaaaaaatgaatctattgaatgatttttaatttaatggatcaactgtcctgttaacaaaagaggcggtggccgtgtttggcgccaggcgggaggcagcagtcaggtggtccaggggctggaggtgagggctttgccgcaggcgcatgctgctctgtgagaactccgaggaataactcactggagggctataaatgctgaaggtaaccaggccaaggactccagtgcccccagaagtcgcaggggagagacagtctgtcccctctggtccagcccagggagggcctgcagcctccccatgggagccatggccaagggggagaaaggtctccagggctggagggcaggtgggcggtggggctcatctcaggggcagggcgtgggggtttgtgggccaggacccacccaagggctgggtctgggaggtgcttggggagcccagggcgacctggtgtgtgccctgcgggatgccccgagggctcctgcttgtgttgccagcacctgcccttgggagccgtcagctggggccacgatgctggcagggtgaggcctggcagggtctggggcttttggagggtgggggctaagggaacccctggtggaagctgccttcagggttcctgcctgccttgaggatgggtgataaggggctgggccctgccctcctgctgcctgggctctgtaactgatgctcagaggaccgggtggagttgggtgggagacctaaatgctccacggtcctgtaggtctcagctggcctggccccgccacccagcccacacccttcccctagggccctctcaccagtgtgagaataggcctggggaagtctgggcccgggaggcccccgacccccactgtccagacaccctgacagcgacacgtgtaaacaccgccaaacagtggagacaggcagccctgccgcccctccgcctctgcagccaggcctggtctggcagggagtggaggcaggtgtccttgcagggagggcccgaagccaggctctgccttggaggatgctccggaaggaccacataagcagtgccctcgtttggattggtcctgcctgagcattgtccccaagcagggcagtttcagccactaggccctcccaacccccatctgtctgatctgggctttctctcccgggtctggcttcctgtcctcatcctcatgggcaggaagacggagggctgtttcgggtcaacctcctgtaaggaaaaccgattactctttattccagcagatccccaaagcgcatcccttggcccagagattcccagagaaccctgcccctccaggtccacccccagactggctgcctggggggaaggagccggcctttagggaaggcagcctggcatggtggaggttccctgggctcctgggcctttctccagccctccagccgcagaggtgacagtgaccagggggctggaggggcagcaggacaatggtgagtggaggggggctgggaggctccctcctcagcctgggggtccctggcaactcccaccttccttgatcccctctaataattgcaacaataacactgtcactaataaaaaggcaggggaaaccaggcaaaggggcgcttctgccctttatgaaaatcactttaatttaacccagatgggtcttgttgataacctcatacaatgagcaccctgaattatactttccgtgagaacacactagttatatttagccacaaattacgactctgtgtttaacaagcaactttgagagtggggagggggccgggcagcctcctgacctggttggacaaaaccggcaactgcagcaatggagaccccctcgctggaggggacgccgagaaagccgtgccacgggcttctgagtctctcttctctgctgctctagtttctttaaaacacttacaacctcgtccgaggtctgtcgaggagactgtggccttcaggtacaacctgagcctcccccaggatccctgggacttctgccttcccacacccccaacctggctccctgcttgggctggagccggggaccttctgggagagcccagttcgacaggctggggggctgggggccgtgtgtgcctggaggacaatcctcctacccaggtctggcccctgacaagtcttgctcctctgtggcctgcctcagcccccttaccctgggcctcagcccaggcctggtcgggagggggcaggcgctggggacgagggtgagggcactccctccatgcagccccctcccctgccacctcatcccctgggtcctgataaataatgaaggggctgtgactggaagcttcgttttcagtgggggcagcccccttcccttcggaaccttcgccgtcctcttcccctccacaacagttctgctcctaggaagggtaagcctccaaaggcagaagctgtggcagagaaaaggctgtccccccactccaaggcacggaccctggggcttcccgatcctccccagagccagaggccacaccgctgagcaggggaggtgaggggggaacacacagacctttcccccacaccctgttccctccaggcaccaggcaaggccctcatgaaaagaactcgccccagtcgatagcagagggacccgtacaggcagatgggtggggtggggggtcaggacctcttccaggagggagtgggattgttcctaaccccctgcccccagctgtcctctggaacactgattctggggtgggggtgagctgctgctgccctccagttgagggaggtctctgtgctgtgaaccatcttagatcccccacctctaccccacctctaccccgcctacccctcctgccgccagccccagcctcaggcctggcctctggacttgtccccctgcgcctctggtgggaagaattaagagtcaatttttgtcgtcaagaaattgtttctaatttgccctttgactaatggcccagggaacaatggagagatacccaacacacgattattgggggcgcagcgggcgcagcgcggctgctctcgggccgaagcaggcatttatttggagcagcggctaattcacaatttcatggaacttgcctgacacccccacccccttgtattaaaaaatgattatttatatgatgatttcagacagagcagcatctcagaggtttgggagccgggagacctacatctgctgctcttggggagcgtgggggtgggagaggagtgctggagggggctccagggctgggcccggttgtgggggaacaggggcccctaggctgaaagggagaaggcagttctcgggagtgcttctgcgtgtgtgatatgcctctgcacacatgtcttgtgcatgtgggagtgtcacatgctgcacgaggctcacctgtctgcccatctgtgctgtgggtttggttttgtgtacacttccaagtgattcacatgtgggcacatgagtgtgtgcaggcagatgtgtgggcacacattcaagactgtgcacaagtgtgtgtgtgaatatagtgtgcgttaaagggtgatgtgagccggcctgctaggtgtaggagcgcagctggttatgtggggcggggggttatctgctccccaggccagagggcaaatctggagtggtgtatgccaggcccatggaagtgactccagatcctgctggagagggatcaaggtggggttcaaggccactcctggcactgttccaggccccactgggtgtccacaggcctagcctcacttgcagcccgctcacctgcaaagctgcaggaacttcagagacctgggccctccagcatcaacactgacctcgggtctattatcccctctcctttcctccccctctgtcccctcgctggccctctccccagtggaaggcaagtctgcagatccccacaccatgttcctctgaaattaaaaacatttgttagctctggacagcaggaagagtaaaaaaggaaagtagggaggtttcctctgagcagatcgccagcctgagctcccggcggcccaagtcttccaggggaactcgggagcttattttggtattgcgggagctgcccagcggccaggcgcctgtgctgggcagctgccagcccctctccaccgcgtccagcagacccgtctgcagttatttgctgtaacaactgttttgaaacagtattgaaaaaaaaaaagcccactagaatttgcttcaagtgaacactgggggaggaggaggcagaagtggggaggaaggaggagggcagggagcttccgcactgccctggaaggcgcactcgacgcctcggggcctttgcccacgcgagcagcctctttcggggacacgaagggaccagcacttgggggatttgaagccagtgctcatcctaggaatctggtgaggctgagccagaagggtctaaaccagcttgaggagataggggccacgcacccgcgagctaccctctgccctcccatgtccctggcagtgggcatttctcaaatggtgattgatgactggggatgggggtgggcaagccgagggcccatcattcaggctccaggaccctcgaacaatctgcccacgggggaggggaggctggtttaggggctctgaggggcctttccagcggctgtccttccaacacactctagaggagaccaggactcccaggggcttggggcctcccgttcccccacagggcggttagaggtggagcacctgccctgatgcgaggagctcagagcaacttctgggacaccacgggtggccacggtgttctttttgttgcatccaagatttttctcgtatacgtattttcctatattaaaaaattcaaatgaggctttaaaaattaacttgaaaaaggttcctgatccggaaacaggctcatcggaggcagtgatgggaactcggttccttaggagagtaggaaatgcgccgtctgcgaggggcgccctgcgtggacccggggcctcggggcgcgtccacttacccgagccaggagagactgggccccacggtgttagccccgcgctcgggctcgcgcgccgcttccagctcgcgcctcctccatccccggagggctccgcgggtccccggcgacgggtccctgcccagggtccgggaaccttcccctcccctcctttctcaagcgccatttctccggagccgggccggccgtcctcggtgtacgcgggaagcgggcagcctccgcctgcacccgcggggccgggacccggaggcacccgcttccccgacacactcgctggggccgctgctcgctgctccagcctcccgaggccacggcaagagcccgggggtcggcgccacacacccccagccggcgaccgcgcccagggacctaattcaatcgcccccagcctaatgaatagccgcgcgctaatcggatctccgcgcgcttcggggatttacgcttcccggctctccccctcgtgccccgcggcccgccagacgtcgcttccgaaggcgccggcctggggcctggccaggggctcggccgcggggggtcccggccgccggagccgggagacgccggagacgggagccgggcccgcgcgaccgccactcccgagccagccggggtgggccccgcgccttgtcctgcgtccccggcccggcccgcggagcgccggtgcttacctgcgagccccgggctctccggagctcccctccgggccgagccgcccgaagcgggcgccggcgtaggccccgactcaggcaggcgggaaatcccggagtccccgcccgcggcccgcagccccccaccccaggtcggcgtggcctgcgggggggaaggccggccggggccggccgcccgcttcccctttctctccagattcctttgatccgcgggctctccgccgcacctcggctcccgggctgccccggtcggcccgcggggatcctggaaacggtccccagcttatctcctttcatcaagcggccttgggccgccttgaaaccgcggagccagtaattgcttttttcaggaggcccagtgcggactggacaacagccaatcagcgccttgtttacactcggtgatggacagtccactggcggagtgccaaccaatcccagcggtcccgcgggagcgggagtgggggcggggaaacagagagacaacaggctttgagtttaactctttcgtgtccctgccggaatgagacggtggagaatttcgaatgcgtgtgaatctgtcagttggctcctagtttaaatatccttttttcccccagagggggaggcagagattcacatggagaaagaggagcaaaaataaatgtatccatcgccactaagacatcacctcgactccctgagaataaatagcatttgggtgggaaaccaaattctaacagaaatatttgtttgcggaatattttagaagtggtttgcatctgattacgataaaaattgttcagtggcttgctttagttggagtgaggatttagcagataggcagacagggagcagcattgagaaatactatacatggtttaccacaccatacccgcttcccccattaccaaactgaaaatattttctaaatctaggtgtagatgaagaaagggcaatccttgtcttctcaataaatccctgattttcattttagtagctgctctgttgcaaagtgtggcagagggagataaaattgagagccagtaatgtagacggctggagactcagaactcacttcccagggtctgatccccaggtcatggggaggagagagccggacgggctattcaaagcttttgctgcccaagcagcgggcgtgcgtgcgtgcatccgcgagctcgggtccgggcaggcagcagcttcagagcggtagatgggccaggcaacctggggaggcctctgggcttggaggtctggcctacctgccacctgccagacagattccagggagaaaaagcagctacttttaaggggtggtggtgtttcttcccttggccttctgtgcggcagaagccaaacgttagacctgctggattaaacatatatgtgtgtgtgtgtgtctgtgtctgtgtctacgcctccccctccgccgggacacgcgcactcgctcgctccagctccctctcccgccctgcgccaccacattcccattcagcagcaatgatctgcgcagaggagctgcgcagtcgccgggcttgaattaggcgccatcgggcttggtagtagccccgctgcttcctgattggcagttccctggcccggcgccagcctattgggaggcctgtttacgccgaatgagtggcacgagctcccggccgtggagggctgcgcggccaatcagcgcgctggctgttccgggctgagtggcacgagcttattagtatgcagggcccgtggctcgccgcgccaggctgcaggtttgagagccgctctggatgggctcgctagagtcgttgttgtggaagcggtgcatttacagtgcaacagtcagcacattgaaaataccaataggaatacaaaacaaagtcacatttactgatttaattgtattgcattcagttgtatccaggaaacagcctccagtaagtaactgaaattgctttcattttttttttgtttttgtatttttattattattttattttttattctggctttggggttttacattttttttagcaaaagaaattcaggattgtgatgttaagaagtatatatcttcccttttaacaaaatccgttaaaatgttgaggcttttttttttcttaaaaaatatggactatgagcgatttttttttctctgaaaaatcttatcgatcggtttaaaattacccccgtaatgcatccttgctttgctctgagcgcttgttgtctcgatcgacacccagcattaaaaacaaatactcgaagacaggacagggaccgccaggctgcgtctggcgcgagccgcgcgggtggcaccgggcggacagtaggcgaagtccgggcgccgccagcgtgcgcccagttctgggtgacccacgaacgaaccccaacattcgctcccctaccctgctcccctccccggaacagtcctgggttggccctgcccggtcggtccgcggcgaggggaactggccgggtcgtggtacccacggccgctgccctgaggggccttccgggccgaagctaggggccggggaggggaatggtcatggcgagtttttcgggtcttcgttcccaattcagaattttttttttccggagaagtgggggtggaggagggggaccgagcaaggccggcgcagcggggcgttttcaccgcgcgcgttcgggacggcgcgcggggctcgggtcacggcccgtgtggcggggtccgcgggctggttttcttcgggcgcgggggtcaggcgcgaccccagttctcatgactctcccagggagcgggtgcggctgtttcgcagggagcgggttctgcggcgacggccgagccactcgcgccccaaggcgcgcctggtcccagcccggcctgcaggccccaccgcgcccgcgctcccggagacgacgccggagggaggcagacgggccagagtcctggtctccggcaggcgggcgaggagagagcgggtttttagatgcaaaagcaggaaacaaagcaaacttgtagaagctccagatcctggagcgcgccagccacgcctggggccgcggcaagagggaccggcggctccagggtcacgccctgccttcccgggagggagccctgtgctcctaggttcagttccttccgaaatgccctcgtcagcgattctccgcccgcccggggccctctgcccgccgccacttttcgctccatttcctcccttacctcagcccgacctggcgctgcggcgccgtcctcgcggtcctccggcgcggcctctcctggagctgggctgggagtgggccccgggcctcggcactcggcgggtggcggcgtcgccgctgcgggactgtgggactcccagctcgggccgtgtggccgcccttcctcgccccacttcctggccgcctcaggctccccaggcccccgaagcccggcgcgggcagacgcggaggcgcggcgcggcctctccccgggaggagagaacacaaagaaaagctctctccaatccggtcagagccgtggcggcgcaggcaggcgacagtaatccacctcctgtttgcttaaaaagtcgagcaggctggtgagaaaggaacaatcgggcctgcgatccgcccgcagggggtgggagattaaaattgttgcttcgtagccgagcccgcgtcccgagaatcgccggcagctcgcgctttctcaactttgaaatttcttattggagagaaaaaaaaaaaaaaaaacaaccacaaaacaaaagcacagcacacacgactccctggaggccgccaggaagcctggcacccccgcgtgcgcagcccccggcccctctccggccttcggcgcctttgaagctgcaggtttctgacctccctccctttccttctttccctttgtcccgcccggcgccctccggggctcgggaggcgccggccggggctgggggcccccacgtccctagtccagcccgggcagcccctcccctgacccctgcgctcgcagccccctcgccagagcactctccgggccctggcggccgggcgctcgctttgcaggccgggatcggggcttgggagccgagctatttgttagacccggggagagagctggcgatccccagagggaagggagccccaaacgcctttgtatgtagttgccagacaaagagaactctttgtgtagacccatttatttacaatgcaaaagctctccgaataaatattaaaaaagcttatcagctgagcaaatatgtattcacttaatacattatgttttcggttatagattaaatcaaacacaaaatagtctgcaaataagacgttttagaacccggaccataaaatatcgcaatttaaaaaggtattcagtagatggaaaacatcttaatcgctttgttgtcatggtggaatggctacaaaaacacaaggttttccgcaaagttcctaattaggaatatcaagcctatccatctcccttttgttggaggtgataaacattaaaacaatacgtatttagaagatgaggagtaatatgtgaagtgcgtccagggagcgccttcggagggacgcctgggagcacggtggtgcacgcagcttctatcactggctccgaccctccgcacccagagtctaaaattgtccccaatttcgcctgagtggatgctccgcgttgggtgggggtggaagaaaatggaggtgagggttattttaggtggccgaggtccgggcagggtctgctggcagaaggttgtgctgggccgggcccaccttccccggctagagggccgagctgggcgccgcagaccccgcgtacccaggccgcccggtactgcccggagcggagaccggcctctgctcgcggtccccggcaggcgctgaaggaagaaatcccagggccgatttgggccgttgagagagagcattctgactctgaaagcaccccccccacacacacccccaagcccccaatccgcagaggaagatcctgggcgaatttgattggggggcggggtgattgttacagcctcaacaggaagctcccggctccgggacagcaggccgggcactgcggcgtggcggcccaggtgatgccggtggcggttgcgggcctccggggctctgaggagccggcctggggtcctagcgcgatgctggggacaggagctggtcccgctggggctggggaggggggaccacggtggattcagaagaatgggccgaaagatgcatgagggggatgggagtggggagaaaaggaaggttattaaaaaaaaaaaaaactcttgagttacaatcaataaaattactcgcttaattagcatggttattcggttaagcggaatgcagtaaaagctggacctcggcatgaggtggggagagggggagagctagtgtggaccccaggccttttcctccgagacacctttgggcagcgggggaggggagagggtgtgcgtgtgagtgtgtgtgtgtgtgtgtgtgtgtgcgagtgtgcgtgatggcttcgcagatttgggtttttatcacccagcagagccagcagcctcttcgccgcggcgccctagctgcagggacccgcggggacgagaacgggaggcggcgagcagtgcggctgggttcccccggctgccccgggccaagcgtggccgggacggtgcgtgcgcgcgcggggccccgggtgctgggctgcgcgcgcgtgcggcggggagacaccgagcgccccggccccgccacccggcctggccgccgctcgctcgggccggcgggggtggggggtggggggagtgggtgagcgggcggggcggggacccccgggcgagccgagccccccagtcacccgtgtctcctctgcttttgcctccacagaccatggacccgcacagcggccgctggctcggtgcgcggccgcccgccgagaagcccagtcctcccgcgtgctgaccggccccgccgccaccaccgcctgtgaccccggacgccgccgcctctgcgccgcccgcgcgccgagccgcccccgggccccggccgcgctgctccgaggaagcggcggcggaccggggccggggcccggcatggatggccgcgactttgcgccgccgccgcatctgctgtcggagcgcgggagcctgggccaccgcagcgccgctgccgccgcgcgtctcgccccggctgggcccgccgcgcagccccccgcacacttccagccgggaaagtacttcccgtcgccgttgcccatggcttcgcacacaggtcagtgctcggccggggcgggcgcgggacgggagcgttcgagagcggaacagggcgcccacccctccgctcccgggagcagagaagctttggtttcatttcccggccccggccgcggtggctgcctgggcgctgagcggggccgcgcgtcccgccagccccccaagctgcgtcgccgcggcttagagaggcccttccctggccaccctcccccgggggtctcggaggggcagccccggagccggctgaaattaaagcctttccgcgcctcgccaccctcccccgccccctcctgcagatctaaattccacggaaacctcttttctgcattctgcattcacctccctaagacgttccggggctgggacaacgaggcgctttctgcggaaacaaaacggctgttgtggcggggggaggggaccagggtacgccgcggcctcgcggattagagtggtgtgtgcgccgggcgagcgttaatagggactgctggtgtaagacgagcaaatcctgtttctatataaagccttaaagtgtcagggcgagaatgggtttgcagggatgcatttgccttaacgagtgcctctggtatcccgctaaagccggacaaagcgtggccagagtgcggcccagcctctcagcctgcggcccggggaggagggcagcgcgggcgcgggctgggggtggcgcggggcggcgctcaggatttcggtgcaggcgagagtgcggcggatttgctccaagaggagagcgaggcggatttgctccaagaggagagcgtggggcgccgtgctgggcctcgcagggacggatcctctcgggcggtcccctctgactccctgcccgagaggatcagtccttggcagagcgggcccaggcctccagggcagccctcttcccggtggctttgatatgagtgtcgagggaggtcagggtaggggcagctaccacgcctgaagccctagaggtcaccaggcggcgcgggtagattcgggggaagcgcgcagggctgcgctagggacccgccgggtcaccctggtacatgggtggcttttgtttacagtttgttctaaacatcagaaatgtttgtcgcttttaaaaacaaaattggcagtaacagttattattggtagcttgatgaactgtgaatactaataaaattatatctgctttaatgggattacaattagtgtgtggattaaaacggatggcagagacggggctagaaaggaaaacgtcggaaaaagggagggcactcaaagaaaaacgtacattttctagaaaaaaacaaacttgaaattgcttaattgctaacgggcttccagcatttgcagcgccaggagattggaatgggggagccgcccagtggaggggtctccccagcacttcccgggttggcccacacccgcttccctccctgcctgggcctttggcgaggctgcccttttctctctgttgcccttccttctttttctccctttcttttttctcctctagatttgtaactggaaagagaaggagaaaaagcacttgcctgagcgatgggtgatttaaaaatatctcttctgctgtccctgtggttatcaagcttgtcttcctgcccctgcatgggagctgctgcccacccggctcaggtgcacggggcgctgaggctggggccgccctggcagaagggacagctcgccagcctccccaccagcccctcttctggctgaaggctggtggcccccactgggggtagggggattgtgtgcaccccacctccactgtaccgtgccctccagcctggcaagtaacagcacgacagagacaggggcccctgacactgaggcttgcatgttggtgcacaggcaggctggggctgtcccctccgggaggcaaggccaaattccccatcaggtcaggtcagcactctccctgaccccatgccccagctcacatcctggccaggtccaggccagctgcattctcccccttctgcccttacttccaggtctaggcagcacccgggtaggtgggcgcctggtcgggtggcctagccctttgtcttgctcattctaagtttggccacgtggttcttggcgtgtaggccccggagggctgtgagaaacggctctgggctctggcctggcctgtgtcctccctgcttcttcttgatcccaggtcctcccagcctccccaagcgcagggtgctctagagggcgctggaggcccctcggggctgcctctttcagggtctgaagggtcatgtgtccccgtccctggaggccccatttcctcccccctgcggaccgaagagaacgcttgtgctcggagatgttcaacccatttgtgatgggcaacttggtcatgcagacatccagctagaagcatctgtagctgaaagaaagccttttgaaattgttaagagccagaatattgtattggtttttaaaatttagctgcatgtatttttttaaaaaaagaattataccccagatcactttgctttggtctgtgtctatatatgatctagtttagagagaaaaaagcataattacgttaaacaatttttttgcgtcttgtgtgcggacttccacatggctggtttggctgccttgcttcccattttcctggatggcttcagtccgcaggccacagctgcagccagcccgcccctccctctgctgactgccccttggaaaggaaaattgacccggattcttcccgcctgtctgggagtagaatccaaccatcggggatggaggccctggcctccatgaggctgcctctttttgctgggctgctcttcctgtgcctgtctggcctggcactgccaccccggctggactgaggctgttcctgctggctgccggggctgcctttccccaaccccacccaacactttcagaatgtcagtctgaggggccctgatgggtggggacatggggctcccaggcttcttccattgtttttctaaaaatgaaagtgctgggagctttagactcgggccgcaggttttatggtaaagtgctgttccagtaaccttgtcaccaaaaggtgcaattaaaatgtttggaatcattatttttagttcagtgttagattttgtctctaatacagatggtccggaggcaaagctgtgaaatctaggggggagaaaagagaaatcaacaagaaccaacccaagatttttcatcagtgctactgcctggagccactggggctggcgcctctgctgggagtgtgtgtgtgatccgaggcagccccggcctggggagaggcccacatagacagccccccgtcctggcttctggctgggcccgctcctgtcctggtctgtacgcctcccctctccaggggccagggctccaccaaggcactatttctcatcttggtttcaataatctgctcagattcccctcccgccccttctcttgtcttctttggggtgtaaattgctgaagcctgggaaaccaggtgctctgagcctggggttattgtgggagaaaggcgaaggctccttctggtgggagaactgcaaactacttctttcctgctgaaaaagtgcttcctaccgccaatctcaaaaaaaaaaaaagaaaaagaaaataccaaaaaacacaaccaaaaaatacccccaacttggcagaggaaaaaaaaagataatttcctagtgtgaaaagaccccatcacaggctcctctccctcatcatgtgatatttttttgtaaagaaaaaaatacattttcttaaatacctcattaactccatgacacgatggagtgtttctgcaacagttagcaacattaagtaggtgtgaaaagagttactttccgaagacgtcacccgtcccgctccataagtgacagagttagacatcaaagttgccgcgagcccaaaggagctacgggaatccgggaatgtggggccgcgtggaccggcggcggtggcccgccacgcccgccccgccgaagccctgtttggaatgtgggtttcccccagtggggctcgtgctgccaccacgtctgattatcccggtacggagccgccgcgctttctgtaggaatatccaggtcacgtgagtaataaggcaaattagtgagccaggcagagaacggcgttgtgcaaatagcacatctcccctggaaaacgcgcgtccccccaaacgttccccggttattcttagaaatcttctctcatctccctgtgagacagggttcaacagcccccacagacaggacaaaatgcataggaggctgttagaataacatggatgaggctaaaaatacccctcagaaacacacataaaaaagccaaatccaacaacagaacgagctaaaaatattccaggctttggcaaagagcacagagttaaataaattatacaagagccattcatgggagcaagttgactttctctcttacgggaacttggttcaagctaataaaaataataatttactagccactgagctttgcatgagtttaaatttaattggtggggcttctggcgtttgtcacttcttggcgattagtggtcttgccctggcctgggccagagtggggaggggatgccgaggctggggctcctggcagcagggtcattgtcccctgagaagcagggcctgggtgcaagggcagattacccaggaggctggaggaggatggagactattgggggttccatccaggaaggcagaaaaagaactggcaaggcacggctattttaatttgataaatgattgtacacctttaagagtgttttaacaatcaggatacactccagcaagttgataggatgttcgctgtcaacttacatatgtcatcagagctggctgtgagcataaataatgtgcgagcgcttgggacagctgcagtctctcctggaggctgaggcgtggcaggtagcacctctgtcccctggcgggcacctttgttctccttctctctgtgtgtctggaggcagggaccggagaacagtcgtggggaatcactgaatgctgctttcatcctgggtggtttggttggggtgcctcctctctgcggactttttaggtctccccacgaaaataagagtccccagaactacttgaccagaaaagccactgtggatatgatctgaagctagaatagtagcatcgtctggtgtgttttgtttttgtttttgttttgtttttgttttttgagacagtctggctctgtctgccaggctggagtgcagtggcacaatcttggctcactgcctcactgcaacctctgcctccctggttcaagccattgtcgtgcctcagtctcccaagtagctgggattacaggcatgtaccaccacgccctaattttttgtatttttagtagagacggggtttcaccatgtttcccatgctggtcttgagctcctgagctcaagcaatctgcccaccttggcctcccaaagtgctaggattacaggtgtgagccaccgtgcccggcctctggtgtcttttgaggcagcagatgtttatatatagccacttcccaggagttttaaacatccaccctggggttggagtaagggtaactccctttactccctcctcttccttggctgtttcttaactcaatctgcctcccccgcccccaatcctggcagggccttctaactcccaaaggactatatttcccagaataccctgatctagctccagggtctgagcccgagactgtccatgtccctgggctgggaattcccaagcacagatagagttcagccagtgccgctgggaataaatactttcctggtggaagaaagccttgctccatcgtgcccccctgcccttccttctggaagaggcttctgggccccccggtctggcttcctccctaccataaatacctgaatataggcccataacaaatgggacctgtcctctgtcctctgccctctggatcctgtgaggcagctactgtgattgtcctggccaacgccccaccggagagtctcccccaaccccctgagctcagtacatggcatatgccctcttttggagtggtcttctcagaggggcctggttgcccatcagctgctgtggaagcgatacagggactcctcctgggtagcagcagggccagcctctgcctagggagtccctcgagaaaataccgcccagcctttggggtgcccccttgccctcctgacaccctcaaacaacagaagctgcctgccttcttaatgggttcatcctgaatgagaggtttccaaaaagaagccctccctcaagacaggcactgccttgttcccctgaggagggaggcaggctcgtcctggcctgtccaggggagggtccgaaacccttggctcctggacagcctccttgaggggagatggcctccccttgtgtcccccacctcgcagacgtgctgtgaatgggcttggactcagagcacgcccctgtctgttgggtaggtgggttacttgctctgcattccccctcccagcccccgctccccgcccacctgggaacggcttccctggggttccccggtccccattaacctctgggacctcatttcccctcaccgaagacacagtgtaacaagcaaaaaaaacatcagagccagcgtgcagtgtctggaaaatcacccgcagcccaggcccttctgcaaaggatggggcctggaagggcctcgggcgtgggaccgcactccgctcgggctccgcccgctgacgtttttatgggataatataccgtttcgctcacgcaggcctatttgtcagtgggctgcccctgtttgttgtaatctataatattactgcctcccgtggccccagagcagctgccgcgggagaatccagggatggtgggcgctaggtgtgcgctgaggggatgtggtggcaggcgctgggggcaggcggcgcccaggtcctggttatgaggtcggcgcggggtttgcagcgagcctcgggtctggtggggaggcgtccagcgcccaagctgggagccagccgggctggcatgctgcagctgtccacacgattaggttcccgatcggatcagccaggaagtgggtttttttcattctgacctgctgtggcgaggaagggagggacaaacaggtgggctgggttcctgccttcccttctctcccctaggatcccccaagaaaaagtccagtgtcttgagatgcggggactctgaggctggccggaagtgctgcccctctccggggtctgtgggagacccactgtcacttgcaactgtgaggaacggcagagcagccccttgccccagctcagtgcagggacatggttttccagtggaaatttccagaaatgggggatgggtgtgcttccaatagggtcctctgagcagcaggctgggctccctgaagcggagggtgacattggggggcagtgccttcttggggtaccccaccaaaaaagagaagccttagccatattaagtaagaaagaaaccagcctgctggcgtcttcaagggaagtcgggtctcagtgcgactccctctctctccggtccttggagcacagttgaagctttgctttcttcccctgagacttctgcaaccaggggcgcctcctgttcttaacacatggcatgggtgagagtgagcagatccagggaagaagagatgggggatgcccagaccggagacccaagagacctgagcccaggatgggggtgccatggtgggtgggagaaggggctgcgctgtggggcaggtcccctctcaggcatgaacagacattgccgcctggcaggggtttcctggctctgtggacgtagagctgtggccccctcttgggtgaggcccactctgcagaccccagtaaggatatcccagcggggtctagccacaggttcactgaccaagctcacagctgctcacactcacagatgtggcaacatacacctgctcctgtgtgctcacaccatgaggcaggtgttcacctgcacacacacactcacactgttcacaactggcccacaaggagtcccactccagtggcccctgggaaagccaggttgcttagtgactggcacgggcacctgtctgccccctacgtcctccccaactgctccatcctccgtctcctggctcctggttcctggccacctgcaggagggagcagagccccagatccacatgaccctctgtggctcagcctcccttcagcgccttccccggcccccttcctcctgctgcccctgtgtggctgtggaccgtgtcctcgggctccagctgaacttggccttgccctttcctgagctcttgctcggcaggaggaggacattcccgtcaagatcaattccagtgcgtggcgaatgcctcggggccaggtctggtcccgggcctgccctgaggctgtctggttgtcctggaagccgctgcctgcatggggcactgcttcctgtcctgtgtggccacctccaccccaggcctctgcgcctggggtcctagaggttcctagatgctcggctaccccaggccccacctgcctcccaccccccaggctcccaccctgcacccccacctctcagctgccctcagtaccgtctctgcccaccgtgccctgcccctcctggggcctacccctgcctggccctttacttgggcagcttctacaatccccagtgcctgcccctgccaccctggagttctgatcccggcgtcacatcctctcagagcccccgtgtgactctgcctaagtggagaggggtccccgactgctccatgcccacctctcctttcctccatgccccacaccagctgagctgttcttggcctgcagcccttcttgtccccttctatgacctcccagccctgaccacccacctgggtctgtcccacagagcctggcagcagcccctgcccagcccccctggctggcttgtttggggccagtgcctttcccctgatatcagccacctttcctgggagactgcaggctcctgagtctgggggtggaaatgtccttctgtcccttcctatccccagagctgggctgagccacactggcctccgtctcctgccccagtgcataagtgcccatccacgctcaggtgacgcgcacaggcacgcgtgtgtgggtgtgaagagctctgcttttcccctaggatttcacccccacaccggaaaagatgaacgattaactctgggaaaactaagttaggaggtggcagtggtgagagacccagccagggtctctggtctctttattaaaaatcaaggtgttccccccacactggaccatggcgtggggccacaggctgcgtgggcacctgcctgggggacatggcagcatcccctggccttcgtgtagcatcttcagttgtcatggcggctcctgaggctgtgtgcgctacaccttaaagggtgtcagagcccaggggattggcagatggcgctgtcctctcctgattagcgccacacgaggtggtgggagacagaagtgggggtggggctcctgtcccccgaaggctggagctgcgccggctgagtggcctggggaaggggggaagtgcgtgtgaatggagggaggcagcccacagctgtgaaggagggttctggagggccaggagcgggctcagggtgggggccagttccttttcacctcgtggccctggctggggctgtgaggcgactccctgattgtccacgcggggtcgcgggggtgcagctaggattgggagcaagagccagtggcttcatctgggtcatagagcactagtgggtgaggagggacacctggggagggctgcctctccccgcccaagggcctgctccccttgccactgaccagagggaaatcgggcccagggagaaggccgggtgtgaatcagctgcctcaccctctgcgacgtctccatccacaggccggccctgcaagcacctccccagcaggctgggctgtgccagcgagggggagaccatggccctgggactcatgtcaccaggcaacagcgctgcctcaggcccttcacattgtgggttttgccttccagtcttcaggcccgggagagcacctggcctcagcgcctgcccgagctgaggggagcgtgtgtaatggggccctgccaagccaccttggctgcagctgccccggcctaaggtggggatcggtggcccctgctcttccctccctgagtctaggcctcctacctctaaaatgggcagttgccctgccctgctggagggttgagtgggactgggggatgcagttgtggccccggtgccctcccaggagcactgtggccgtccgtgtcacctgtgggggtcctaggagcctgcacgagctgccggaggcacatggcctgtgcacgccccttccctggcggagactcagaggcctggggaggaggcggctgtacctgggacccttggtggggcctcccccctgggcagcaggcagcgagactcctgagggcccacctcatgcctcaggcccaggccctctcctctgtgtccatcgagggattctgtggccttgaggccttagtctggccgtagaactaggaaacctgggcccttggctcctgtgccctggcacgggggtccagctgccccacttacccctacctgtgcaggggcttgcatggttttggtgtgaaggtggacgcccaccctccagcatgtcctggggcgttggatgtgactgggatgggcagatgtggacctgctctgaggcaccacgggtcgaggcaccacgggtcctggcaccacgggtcctggcaccacgggcagtgcagacgctctggacccccaggtggggcccaggtgctggggggccttcgtggccttccgggtctactgggctctgggacttcagagagcttcccagtggcagagggggactggcccaggggagacaccagcagatcatgtgggatgggaccacagagctggaagagcaaagatgtccccgtatccccccagtctcggggcgggggtgggggctctctgcctggggttgggggacaatgaagcaggctatgcttccccggagtccaggggtggggatggccgctcatcaaacactctgctcccccagggcgggtctcagacctctctaggtccctcccatgaaaggagggcttcggagccgcacctgggtctttgttgtccatatgtctgtgtgaaggcctggggcccccgtgcgcctcccctcgggcctgaggggtccctctctctggggtcacgctcccttgttctcagtcccgcagccgtcctctgcgtgagtccattcatcacgtgcctgcaggtgcctgtgtcctgtctctgccccaggctgaggccgagggtctgcgccacctgggcatgcccagtggggccccaggaggactcgccacccccagttgagcagctccccttctcggcagctcccaaaccctgaccccagacaggcagcaggagctggacgtgccgtcagcccaggcccctgagagtgaggctggagagacgggaggcaccggtgccctgtgggtgggagcactgctggctccatcctccactgcattcaaattgatcagggagggtggggttgggggggaacagggtccttgaggtcgtcagccagccccacccctgcctgcctgcctgcctgcctgcctgcctgcctgcctgccttccttccttccttccttccttccttccttccttccttccttccttccttccttccttgagaggcctctctacccagcacccacgaagacgggtgagctgctggccacccgaagagggtgtggggtggtcaggtttggggcattccagacctgaggccctccaggcagctccccttccactctgcccagcccaccctgccagggaggcctcagcatagtccttgagctctgggggccccaacccagcctccctgggtctctgggcctttgcctctacccacacctgcacgcctcagcaaggtcgttcccgacaagcccctcaccgccccggcccctgcccctccacaccctggtcactcttccctccagctcagcgcttaccatcgtatccctgcatccgagggtagctttgccacaggaagcatttgcattcagcgagacacacaggcgcacagggactcaagtgtggccacgattagggcaggaccagggccccgtggcctcctggtttctggcttcagctggtgacccccaggaggcctgatggcaggtcccccgtccctggccggtgagctggctgtggagtggcaggaaagagcccagctctgtggtcccccaggatcctccggatctccgtagtgggacagctaccccatccggccagccctgccgtgggccctggtcactccaggccagcaggtcgccttgtgggcagttttcctggaagccagtcccctctctgagagttttcatatccctttgggtgtcctaaaaataaacttttaatttattttaattgaataccaaaattaacttaaattgtaatgcatttttgggctaactcttaaaaagcccttagtgtgtgtaaatacagataaaatcaaagaaaattcaaaaagtgtatgtgaggccatgccatccttctaacaagttgagagtttgatggtaaatacttagcagaaatccaaagtgcctaagtctggagggcctcaggtgggaggcggctgggggtcagagaccccttggggcccgtcggccagggcagggagcagccaccacgcttcagcctgcgttgctgactcgtgcacgaggcaggtctgtctggagtcaccgactctccctcctggcccttcccgtaccttcccgggggctctttccccgtccgcgccccccgccccaccctgtggctctgtctcttccctgcatgagtagctggggctctctcccacatgatctcacaactgggtagcttaaaacagcgaacattgattatttcacagcttctgtgagtcgggaatctgactcagggccaggtgttggctggggcctcggacatatccagacccagctgtggggagtcccctccagaggccaccctccggctgtcgtgggtgtgggagtgttgccggctgctggctggaaggagagagtgagagagcgcaggacggaagctcggtgcgggtgcggcctcaccttgcgggggcagtgggtgggtgtcacttcctccacatcctctttctagaaacgagtccaggtcccgcccacaccaagcgccaattacataaaggtgaacaccagggtccagggttatcagggccttctctgaggccccccacagcagccatacgctccccaaccccagagtgggccgtcgggaccccacccgtggctgtggctgcctcccctgtgctgaccatgccccccccgggcgctcgctgctggctgggggagacctgccctcgggggtttgtgcctttcctctgccccatgccctcggcctccttccctgtgacttggccaagcgtaagccccgggctcactggaagcctcgctccttctcagcctctgcacccccgtgccagcctggtcctggacatctgaggcgaggctggccctgttcgtccctcacccctcttcctcccccttctgtcttccccccacaccacaccaccgcctccactctgggctgtcccctccgcagcagcgggcccctggatacccgtggaccgtccccaccccagccagggcagtgctgtccacgcaggtgcagtatcgtctcagcacctgtgggaggtccgttcccagacgtcctgccttggtggagtgagcagaccccgaagcagccacaaggccgcgggggctgcagcaaggtcccagggcccatgcgggaggcagcccgctcggaccacctgtggcttccctgcactccaggctgggctcagggcgcgggtgcgtgaccctggcctgtcatgggcactcagcaactgttcgtgtaccagccgggttaaggtgtccttctctggatggggcgcagggctcgctatggggtgctggggcggctgtgtcctctggtctgggcagcgctttctccttccgtttctgcatcagctgcctgcctgggtggggtccgcaggtgcgtcagccaccccgggggctcccccagcccaccttgagctgacgctggcagcccacctgggtgcccttgggatggggagctggccctggacctggcctgctggatccatgtggtctgagcgtgtctctagactctcctctgaagctgtgggggtgccttctgagccctgacccgtgccaaggagcccccgcacagcagcccaagccacctgcccaggaccagccgtggccccctcgatgtccgccttggcagcagagcggctcctcccatggcaggacctgtgctggggcaggggcaacggtgtgggggcacctccttcagcgagggccaatgcctggcgccctggcctctggggcaggtcttgtctgggcagcagaggctcaggagggcgctggttctcccagtggtccgtgaggccggcagggcatgcaggcggccagcatcacggcccggaccccacagaggcggagctcgggctgtggggttgggtgctgagggcactaggagctgccggacctcaccagggccttttctccctcggacctcccgtctgggccccaaaccccctcggccagccccatctaccccatcccagaggtccctgcctgagccacccacctcgcccgctcccctgcagagttcctaggaacgccgagtttttacctcagaggctgaggtgaaaagtaagatgaataagatgaacgtgtgtgtcgtgaggacgtgggtccgtgcggcaggagcgctggccgtcgggagggcctggtgtggccgtcgggggcaggagggaccgaggttccccggggttcgtcacagcctcaccacgtgtccccaaccccaaggccccgggacggggtgaggctgggggcggaggcggcaggcaccccctgggcccagccgtgcccactcccctgatcgctgccacgctgcgctgagaagtcctgtgtgttccctggatcccggtgtggtctccgtctcccaccccggcctgtcgcatccccacccgactggccattacccgccacggtgtactatcctcgccagcagctgttacccgccccggcgtactgtcctcgccagcagccgtgcactctgcacgtttgccccctggttcccattggagctctgcccttcccgccccggcccctcttccagggccaccagatgctgcgcggggggctggggacgggcccgggcgagggagctggaggagggcacctggccgtgtgacccccaccctctgagacccgtccgctggcagcttcctggttccttcctctcctccacccatcttcctggaccctgggtttgcccatgcctggctcggtgccacacagcaggggacaggtgtgctcagcctcttggggtcgcagcagggtgctgcctggaggggagttccaagggggaccttcgttgtgaaggagggcaggctgggctttttgaaggtggctgggtgtgaaccacgccttgagacacagagtttggcagggggcatacgtccccctggaagggtaacgcgagcgcgaggccccatgtggttggagccagctgtaccaaaagcagttggctgggaaataacagaaaatggcactttagtgggggccggtccctgccctttcagcctgcagtgacctgtgctggccccagccccttcctgggatactacagcctgagccaacctcgttttgggagtcgggctcttggcacctggtccttcttagcaccaggggcaggagtgacctgagtcccctcggtgggaggtggagctctcccggccaacatagccacctccatgctggatgtggtgatcacagcgtgcgaagctgtccctgctccctgacctaccccccagccctgcttaagctgactgacacagaccatagtttctctcacctgggtgcggggaccccagctctgggggctgcaactacccacagaaccatcgaggacggcccaggatggctgtgggcagagcgccccaccctgccagggagaccatgggcctcacacctccaggcaggccaggctgggaaacaatgtgtgcgtgtgcgtgtgtccatgaggatgggtgtatgcgcgtgtgtgtgtgtccatgaggatgggtgtatgcgcatgtgtgcgtgtgtgtccatgaggatgggtgtatgtgcgtgtgtgcgtgtgtgtccatgaggatgggtgtgtgtgtgtccatgagggtgggtctatgcgtgtgtccatgaggatgggtgtatgtgcgtgtgtgcatgtgtccatgagggtgggtgtatgcgcgtgtgtacgtgtatgtgtgtccatgagggtgggtgtatgcgtgtgtgtacgtgtgtgtgtccatgagggtgggtgtatgtgcatatgtgtgtgtccatgagggtgggtgtatgcgtgtgtgtccatgaggatgggtgtgtgtgtgtccatgagggtgggtctatgcgtgtgtccatgaggatgggtgtatgcgcgtgtgtacgtgtatgtgtgtccatgagggtgggtgtatgtgcgtgtgtgtgtgtccattgagggtgtgtgtgtgtgtgtgtgtccatgaggatgggtgtgtgcatgtgtgcgtgtgtgtccatgaggatgggtgtgtgcgtgtttgtgtgtacatgaggatgggtgtatgtgcgtgtgtgtgtgtccgtgaggatggtgtatgcgcgtatgtacgtgtgtgtgtccatgaggatgggtgtatgcacatgtacatgtccacaaggatgggtgagcacacaggagggtgagagcctgcccccctggccatcccgagcctgcacctgcctccgcccacctttcttcagctgctctggcatggagcctgtgtcattgacgtcgcctgtttgggccaggtggcaggagttaggagcacgctcgcagcctgtggctggtccacttggaggatgggagaggctggccagcagggccacatggctatgtggacacagggccaagagcactagagtctccctacagcccggctctgtcggggctcatcctatggctgctgtgcccagggaggccttgcacccccatccgttgccgtgttgtcccctgcatgtccacagctagactggacatgtccagggtcagggcagggggtgggggctccggttgagaggccggagtgtaggagggcaggtgggtgtccacgtggcctcccttgctctgcagggacccgagggccagggtggattcctgggctggggtgtgcgtgcgtgtgcccctgacatcttcaccggggtgtccgtctccccgcagctggctgtctcaagatggtgggatgggaagcgttcagtttggggcgaggagactcatccagctgcggggggcggcgccgagggagtggcgctgaccaccctggttgcattcccacgcccctggccgaccgccccacagccctccagagtgtcttaggggcaaggggaggtcctggccacccgcctgcccaggagagcgggtgagagacatgggagaaggtgtgaagaattggagaagcagagagggagcctgcctgtgccccaccctcagtccccaccatggctgctctgagtcacttggcacagagctctcaggggagggagaccgaggagggacgccatggggagcgtcggccaccccccccccgccctagccaaagggctaaatttacccttttaataagaaccagacttatatccgattttccttttcttttattagttctgggctgtcggtggctgagcccatcctgtcatcatcacctccgggccgtttccacgctgattgggttgggtacacagcaaccacagagttttcctattaaggcctgagagacgctgcctctgggccagcgcaggcttctggaaggttctcctgagccagccaaggggcttcccgggtgacgtgctcctgttcctgggcgggcgcccctcccacaggctgctgcaggtcccgggctgagcccatggctgcatgctcttggccttccctgcagcccctccctcgctgcccccacactgcttcccatcctttcgcacctcgtttttctctgttactcctttctccctgtgcccgcctcagtctccacttgtccagctgccttcgtggagccacaggtggtggggaggtttggtggccccagggggccaaggcaccctcagacacttccaggctgtgggggcagaagaggcaacagtaagcagggcgggccccgtgtccaccaggtgtggagggagcagtgctggacagacggacatctggtggcagcaggtgtgcagtcgggacagagcgccgccccgaatctggacagtttgcgggccctggagagggcttcagattggagagggttccaggacagcccgagaaacattgggtcctgcttctccaccacagaggggagctgggcctggccacgtgacctgttggctgcccgccagaatctacaagactcccaagggccactttagggtctggggtctcactgccccaggagacgcagctcagaactgagcagctgtgccgggtcagggtctggttcccatgcagcagtgggctggggggctggagctgcaacttgatggagatctgaggcccccctctaccaccagtgggccgggacatgccccgacccagggcagctgttcatcccggtgccgcttcaatgccaccttttgcacagcggaggccaagagcccttgccaaggttcaggtcagtaagtggataagtctggtggaggcctgagccctgggaagcagcatctttgaggacttgcccagctgtgtggctcccatgcccgagaacagagtctgccaaggtgcgcacacccacagacgtgtgtgtgtgtacgtgtgtgtacgtgtgtgtgtacgtgtgtgcgtgtgtgtgtgtacgtgtgtgtgtgtgtgtgtgtgtagccactcatcccagacatgtagcacagtcagaccttgtgtgtacacccatagtcacgtgcatatgcccagagacaggtttgcacagacacaccccgtgagtcacacacagtccctcccctgcctctgtgcaagtgtgagtgtgtgcaagtgtgagtgtgtgcaagtgtgaggtgcaccccacatctcgagtctggaccactagtgattgcagccagggtgggggaagcatcactgggttgtatctgggggttgagcctgcaaacacctgcacacccagcatgcacctgcctgtctcccagccacatctgcacactggggtggcatgtggctgggcctctagcccctgccacagcagcttctggtctcctggtgcgggcggaggtcccagagtggcctctcaccccaggcagagcctggtctccccaccccgtccctcattcctctttctgggcagccaaatggtcagatgctacacccctgcctccaagcaggctgcacctcccctctgcatccacgcaggaacctgtgcagggcggcttcctccccgcgctttcccggaatgaggaatgtggggcagggccagcaggggggctgctcctccttcctgcctcccctcccgtcctgcacagctcccttgggagcctggctcgtgggaagtgtgcttgggaccgcccatcactccgttcccagccactcctggtgtcccccgcctgggcgggccctgtggggagcggggaaggtgtggagcggaagccagtgccgagggaagaggggagcctgagtgggtgtgggtcgggggtgggagctgacgcaggcggcgggtgcagccgccagactcggagccggggaggcccatgccagcagcccggcagctgggcttccggaagcagcgggagccgggagcctgggaagggcctcgctgcttctctggagctgccgccatctcaacgaggcgtttttttttttttttttttttacaacccatttcacagtttccagaaaaggaggatgctgtctcggcggctcacttaactcaaaacaaatgctcgctctgccggctccgcgcccgcctctcccggctcccgggccctgccgtcctcttgttccgtctgccttcagtctggtgccacagggcggagcagggtcagcctggcaggagagtggggtggggcacagtgggcacctggccatccgattgcccaggcccagcctctgctgtgtgggtcctcgggaccctggatgggggctgctggcacggctgctggaccgacccttacagagggagtggctctccggggagtcctgggctccagggccccagcatgctctgtacccctcaggctgcccagcatgtgttgcccttcttagccatccatggcaaggagcctggaagacaggttggcaggaggcaggctagttcccatcggctgtcctggccacttagggccacctctgctgtaagcccatgtggccagctctcacctactgtgtgccggcctccccacacagcacccctgggccggggccaggctcactgggcaccgagactccagcccagctgttgtgcagctgttccccagtcttcccgctgctgggccaccctgggacagcaggtccaggcacagcctgcctcctggtctagttggctggaccttgggctccgggtcagactggcctcccagggatggggctgtgcccgaggacctgagccacctgggggtggccacagccctcctggtgttgctgtctcccgaaaccatttcctcagctagccggccgcccaagccaggcctctacagcatcttgggcagagctgaggtggccctggagctggggccagagcccggtctggatctagagctgcaaacccggcctgggccggctgggcagtgggggcagccaactggaggccagtgtgcagtcctcggtggccccgctgacaccgcatcccgcttactgtcccttccccaggaacatcctaaactcatgctgcctcctgtgatgagagctgatgggaagcctggcagagcggccccaggcaggctctgtgtggggccagggtgccctgaccatgcacgcgggtggggacaggccgtgttcagcccccagcggagcacttggggctatgggcctggaccagcaacttagacttggtcatgctccatctcttaccagccccatggcgggcccacgaccgaccttgggagcatgatggcactacgtcacatgagtctgaagccccaggtaggggaggtgccactgcaggcagtgccaggatggggcacttggtctgaggaggtctaggtcaagaccccctccctggcccccagctgcctccgcctgggctggtaaccacagcacttcctttgccaagaggaaagagccctcagcccggttcccggctggccttggcccacacggtctggccctggctggagcccaggctacactcggctcccaggcagctgaggcacaggctctgtctggggttggccactggtcggcgggggggctggggaggtggcagcctggtctgcccacggctctgctggccagtcacggtgccatccccaaacaccgggaggcgggggtgacagtagaggcgtgatgctctgtcctggggtttcccgggctcctcgggagctgagtgggatagggagggcctcaggtggccggcagtcccgtcccccacactcgcaggggtcaccacagtagtgaccacctggcagggcctgcagaatctgcttccaagtttcaagccaaggccaggacagtgggggagaaatccacgcctttagagtaagcatctgagagcccccagccgtgtgcagggcccctgctcacggggcaagggggatgccgggcagaggctcttcccctgcctggtcccgtctccgaggtgctggcctgctgagcagccagtgagacgccctggcagcagctgccgccagagccaggatttccagaagcaagaggccaccccagtcccttgggggggatggtagggtctctcatggtaggctcagtacgcaggatgcctgggcacggaattggggtgcagcatgcgaccccatgtgatactggagaagggtatttgcagctgtgcccagaagtggtcccagaacgctcatgcgagggcctcagggccggggtctcgggtgactccgcttcctctcgtgatttttttttttcttggaggcggagtcgcactttgtcatccaggcgggagggcagtggaacaatctctgctcactgcaacccctgcctcccagattcaagcaattctcccgcctcagcctcccaaatagctgggattacaggtgcgcaccaccatgcccggataatttctgtatttttagtagagacagggtttcaccttgttggccagggtggtcttgaactcctcacctcaagtgatccaccaccttggcctcccaaagtgctgggattacaggcgtgagccaccgtgtctggtctctcttgtgctttattacctgagcttattatggtgaaaatacaaagacataatgtttgtatgacaaggagacagcaatccaggtggcccgtttccagaatgaaagggaaaaagaagtgaaagagatccccagatcagcagccctgcctgactctgggcacagacagcactttgggacccccagcttggtgaggctggtcaggtgcagggaggggctaggctagagcccccatccccttccctctcattccccagactgtggggccggggacccttcctcagtgggctcagataaggcagcacagcagggtcccccaagtccggagacaggctggttgcccactgagggccccgtgggacaccggggagtgtcctgcccccacctgatgtggtgtgggagagctcaaggtacagggttctcaggccaggatcctggagaaatcccttctccagacccaacttttggacttagttgcttcccaccatcccgaggaggaaaaggcgggagggacttccccaggagggtgtgggggtgggaaggcctgggggactcgaggcgggcctgggcgaggcagcggcaagcttccaactccgaggggagcccacactcaccccacaggcatgccccagtgtccccaagcaggggaagccagcacttcccttcccaacccagagtcccctccctggctgccgggcctgtggtctggccccggcccatggcagtcccagccttgtggtccgggaagcccctggctcgcgggcaccttcaccccctgccctgggcctgggcctggccctgctccacagtcccttgggccggctcttcctctccacccgcccacccgccgcagaggccagctcacagcccacgtcccccaccagcactcacagacccctcctctgctgccatgactgggagaggccccttgagtccacatggctgcgttcgcacacgagaggggaaggggccttgggggccctgggctgggaactggctcagcacagcaggagcctgccagggccgtgcagggcagcccccgccgccccccttgccccaccgcctctgctgagtcacctcatgtctgggaagttcccagggccaagccaggctggatgaggcatcagaaattcacaaattccccctgcctcccgggcaggggaatggctgtcctgactcacctcgggctgggcccccgcagaccccactatccccacgctcagcctcatacccctctttcccgagggggcaggccccccgccccaggttcctggaatggtcccaggccaggcttgctgcccgtgggatggagacgacaaggtgccagggtgcctggctggagtgggggccgctcagtgacagcctcagaccacccacggagcagcagggccaccgtgtgcagaaatctgtgtgtgctgtgtcctccgtgtgcaggagccgatagtcatggcaactctgggaggctccctcgggctggccttggccactggacttgggcagaggtgggcacagctgaggggccacaggcaagcatgcaggcgggccgatggtccgggagagctgggctgggcggggcctggggcgctgggggctcaccatttcccacactcaggctgccaggagaagtgcggggtatcctggcggtgcccaggaaggagcctctcgcggcctccacctgacccagaggtgagcgccatccgcagctctgtgccagcccagtcggggcccagccccaggaatcctgaagggattttagaagcagatccgtcctcagcgccacccttccttcctctgtcccccgccctcagtcttccccctggctcagtttctccctctgctcgcctgagactggggcactcctgtctgacaagtcagtttattgggcctgggtagagggatgaagaccccactcaggagagagaacagctcctcccagtgctgcctggaggggccgagactgtggggcccgtggagctgacacagggcctatggctggggccccgctgaccctggtgcctcatgtatcaccttgacctttttggcaagttcgccagtgtgtgagaggccttggagctgcccacagctgtgggctgggagagtcagggtgctctccctgtgaagaggaggcccatccacagaccctgaaagttgattgggcacagtacccagcacccacctgggtggtagtggtggtgacagtgatggtggtggtggcgagtgatgtggttattgatgatgattggtgattgatgatgatatggttgttgtggttggtgatggtggtggtggtgtggttgttgttgaatgtggttggtaatggtggtggatgatgtggttggtggtaatggtagtggtgatgtggttgggggcatggtggtggaggtgatgtggttggtgatgataatgtggttggtgttgtgtggtggtggtgatggtgatgtagttggggtggtgttgatgtggttggtggtggtgggtgatgtggtttgtggtgatagtgctgggtgatatggttggtgatgatgatgtggttggtgacaggtgatgtggttggtggtgatgatgatggtaggtgatgtggtagtaatgtggttggtggtgatgtggttggtgtgatgtggttggtgctgatagtggtgggtgatgtggttggcatgatgtggttggtgtgatgtggttggtggtgatagtgatgggtgatgtggttggtgatgatgtggttgggggtgatagtggtgggtgatgtggttggtggtgatgtggttggtgggtgatgtggttggtggtgatagtggtgggtgatgtggttgggggtgatagtggtgggtgatgtggttgggggtgatggtgggtgttgtggttggtggtgatagtggtgggtgatgtggttggtgatgatggtgggtgatgtggttggtggtgatgtggttgggggtgatagtggtgatgatgtggttgggggtgatagtggtgggtgtgtagttgggggtgatagtggtgggtgatgtggttgggggtgatagtggtgggtgatgtggttggtggtgatagtggtgggtgatgtggttggtggtgtggttggtggtgatagtggtgggtgatgtggttggtgggtgatgtggttggtggtgatgtggttgggggtgatagtggtgggtgatgtggttggtgtgatgtggttggtgggtgatgtggttgggggtgatagtggtgggtgatgtggttggtgtgatgtggttggtgggtgatgtggttggtggtgatgtggttgggggtgatagtggtgggtgatgtggttgggggtgatagtggtgggtgatgtggttggtggttatgtggttggtggtgatgtggttggtggtgatggtgggtgatgtggttggtggcgatgtggttggtggtgatagtggtgggtgatgtggttggtggtgatgtggttggtgtgatgtggttggtggtgatgtggttggtgatgatgtggttgagggtgatggtgggtcgtggtggtggtgggtaatgtggttggtgatttggtgatgatgtggttggtggtggtggtgggtgatgtggttggtggtgatgtggttggtgggtgatgtcattggtgatgtggttggtgcatgatgtgattggtgatgtggttggtggtgatgtggttggtggtgatagtggtgggtgtggttggtgatgatgtggttgggggtgatggtgggtgatgtggttggtggtgatgtggctcgtggtggtggtggtgggtgatgtggttggtggtgatgtggttggtggtgatagtggtgggtgatgtggttggtggtgatagtggttggtggtgatagtggtgggtgatgtggttgggggtgatagtggtgggtaatgtggttggtggtgatgtggttggtgatgatgtggttggtggtgatagtggtgggtgatgtggttggtggtaatagtcgtgggtgatgtggttgggggtgattgtggtgggtgatgtggttgggggtgatagtggtgggtgatgtggttggtggtgatagtcgtgggtgatgtggttgggggtgatagtggtgggtgatgtggttggtggtgatagtcgtgggtgatgtggttgggggtgatagtggtgggtgatgtggttgggggtgatgtgggtgatgtggttgggggtgatagtggtgggtgatatggctcgtggtggtggtggtggtgatgtgcttgtgacaaagatgtcgttcttgggtttgcaacagcaggagagtgtcagtaccaggacacctggggcaccaaaagactcaggactctgagtgtggcagtcaaaggcatatgggggtaacctttcccatcatcggtttcttggatattgaaagtcaaaggctctgggggagattggggcctgagagtcccctgtggagaagggctgtggtgttgcccctgccctgcctcaggccacaccctgggagctgcccccagagtcactcttgccctgtgtccacagccagcagccgcctgatgggaagttctccggcctcctcgttcatgggcagtttcctcaccagcagcctgggctcggcagcctccacgcaccccagcggccccagctcctccccccctgagcaggcctaccgtggctcccaccccaccacctcccagatctggttctcccactcccacgaaggtaagttggcggactgggctcccagcgacaccctggtggccaagagactgaccctggtgcccgggccaggggcaggtgaggggctcccatcgtggccgtgggaacctggccggtggacggtgacaagcaggctcgggtgaggctgcctccctgccgaggaagccccgggggaagtggtgattggttggaaacaagggcagcctgttcggcagtggtcctggccagatgtgtgctccagatgggcagcaaggggaaacaggggggccaggaggggctctggggagctgagaaaatgtggagcacagctgggccggccgggctgggctcaccctcacagtggccgtgccccacctccccagacgctaggaggcgggctccaaatgtgccagctggaggagggggccggggcggggagagctgtcagcgcacacaggctgccacccaggggcctgtcccaggacaaagagttcctcccaggccacctgcctccccgtgggacacagccctggacacacagtaggtgcctcgcgaatactggctactctcaggctgcctggccagcaggagactcctggaggcccccctggcctttccgtggcagggcacccctgcctggatccccgtgcttgctcagaccccttgccctgcagcctaggaggcggccctgggcccccatgtccttgggcccacagttgctggtattccctcggccaccccaaccctacagcgtgggaagggttaagctccccccgccccccgcggctggcacgcagagaggtaattgcagttggcagcgggcacacagggctctccgctcctggcacccagcactgccgtaactcaatgactgctgagcggcgggcgtcgtgtttacagagcgccgcggacccacacaccacgccaccgccccgttccaggcagggagattagcacccggcactgctggaagcagagaaacctctctttgtgcaacaagaaaggggctgttttccaaacagaacaggtgacgagtgagggacagttgctgaaataatctgggctttcggctcagggcgcacatgttgggcaggcgataaggagtggcctcttcctgggtgcaggggaggccgctaccttgggatgcggtgggcagcatggggtcctcggtccagactcccctgcccagactcccctgccccttcctcccacccctgcactactagcggcctcctggaggggagaccaggctggccatggctcctgggctggctgtgggggccccgccttcctggctcatatgccccaccccgcctcagccttttgtgtctgtgggcaaacgccccggccagccacagcatctggctcccaggatgtctgtgggagggaggagggtggcctggcaccgggggagcaggaaggggaggcctgcggcagccgtggtgaaccccccacaacagacgcaacggccgctgcctggtcctggcccagccacaggtgcacagatccacctaggaccactgacttggtttcccctcctggcagtggtggcccctagtcagggcccagaagtggcaccagcccatccccaatgctctctgcaccaggagagagctcctaccccactccctccacccaccctgggggaccccagcagcaaggagggccgtttgtgggtagcaccacctgccttggagcccccgtcccgcccctctgggggctgctcagagggtgggtgtgtggtggcccacaggcagacagcacccacaacggcctctagacactcacttccccttgtgccaacggctgcctgggcggagctgcccacatcccaccccggggacccccaccacttctcagcccctcacatggggcccggcatcggtgggttccatctgctcccgagcccttgggagtccccctggctgggtgggaagccaatgtcctgccacaagtgtcgacgtgagcccctggcgtctgggcctctgagccccttctatctgcgtcccagggaagtagctcctccaggcgggggtggcctgagccggaggagaggacagtgcccacagtggccctggctgtgtcacaccgaggaggttcacctgtccaccctgctgggcacctggcaccctggctgggcgagacgcatctcccgctgtccgtgtcaggtgggggtgggcacgtgtgcgggacagtgggctgggtggaccagcacgggtggaggcgggacaagggggtgcagggcgtggcctctgagccgcccgcctgggccccagaatgcaaggcccacccggggctgaggatgggtgtgggtgccccccgagggtggcagagcctccaaggccacacacctgcgaggcccgtgctccagcttgctgtcccctgctctgccttcagttcagttgtcccaccccccgggatcccctcccctccctgcgggggttccctgccacgcagccgtgctccccgacagaccacatggagctgccgcgctgtgagctgagcggcagaggccagggccggcgggccagggtgagaggctggctggctgcccgggcagcatgcctggctgctagtttgacagggtgccagctggctccccgtgcgccgggcctgtttctctgccgtgtgtgttcatgggggaaggggagtgaggtgggtggggggcacgcgactcggccggagagtgggggccagcaggcacagcgggctgcctgggcggttggccttgcccacgtttcctcctagtggcccaggatgggcaggaggcaggtgcctggccaagccagcttgccaccccctccccagcccagggctttcgttgagggtaggtaggccagggtggggcaggccaccaggaacccaggttggggtagccccaggaaccccccatgccaagcggggcctcctctctccccatctgcagggcagcccctcgagcgggccagggcttcctgcttccccgggggagcagctgggggtgcagcagaggcagcccggagctggaggagccgcccggaacatctggcctgggcagagcctgtctgttcagctcctcccggcccgcagcttacccgaggctcgcgctcccaccagcggtgggcctctctggggcttggggtgggggcgggaggcggaactggccaggggcagaggtgagctcctgctgggcagcctgtcctgggtggatgaggatgagagcaggggtgggggcacacacagctggccctattgtcagcaggcctggtcccctccctccccaccgcgccccccagctgcctggccaggaccacccacagggccaatgaaagaggattctgttcctggggggctcagctgggaaggggtgggggcaggggctgctgagatccccactgaggccactcgtggtctcttgtgccacctggggggagccatgggggcggcaggcacacacacgcgctggctctccgcctggccggcctcttggtcagaaccacgccccaccagcggccacttctcactgggcctggccagctcctgggggtccggggctacgcatgccgagcactccctgccaacggagccccgcagcttcctgcatcctgccagctgctcctctgtccccttcgtcccctctgaggtctcaggactcgctggtgctgctgggagtgagcaggagctgggaccacatctgtttaagggacagaggtcccaccagcgcccacccaccccgagtgtcctcagaggtactggggccccagctccatccttcctgtgatgcctgccagggacctgctgcttcctcccagaccccttcagctcctccttcctctcccggcctcggtttcctcggtggctaaaacagcttcttggtctgtctcccacaggcccgctgaccaccccagcactgacgtttctaccacatctatgtggggggtgtggcccttgccctgcctagacctgctgtccctgcccatgtgcgagggagagttgggccagtggggacaagctggctccgctgggatgcgagggacagcgtgggggtcccggcgtgggggtggaggggacagcgtgggggtctcggcgtgggggtggaggggacagcgtgggggtcccggcgtgggggtggaggggacagcgtggggatcccagcgtgggggtggaggggctctgctgggccggctacctcccgccagcttctctcagccagagggcggctgccccatccaggcctatgatcccccctccggaggtgtcctatggctttcgggagccagccctcccataccctcggcccctcaccgtggcctgccctggccggccaccctgccagggtcccagcctcctgtccccactggagtctgccctcaggccctggcagttcccaacccccagcccgctgagactttatgcatagcctcatgttcacggcctggctgagtgctgccagtcactgttgagtgcaggggtttcatcccgtggccatggtgaccagcacccaggtccacacctggcagagggctgtatggaggtggctaggggagacacagacttggggaagccaggatagggacatcccaggtggcagaacctgagccccagggaggttggggagagggccacccctggtttggataaagggcctggtccctgcagcttcagggttcccaggaccagccctggcttgaggttgggcaggatgactgcacttctgttatgagcctggccctgggatggcacctgcctccccctggcaatgctgcacagcacagtggtgcttgcgcccattttacagctgaggaaactgaggctgaggattgtgtgtgactgagagcctgtcccctcatcccctccctgccctctgacctgccgtgctttggagtaggtgtaccctctgccccgcaagctcctgctctccaggagccagggacttagccagggacttgggctagaggctgctctgggacccaggaggctgcacccgagcccctgcgcacacccaggcaccgcaggacagggcaggactgtggcagatgcggcatgggcccctgctatgtgcagggcaggtgggcagggcaggggtcgtcacagacccagagctgtcttagcttcgagttcatatgcccagcctcagtttctctatctgccacacccatgagaacagctgtccagaccccatgtgatacagacacaaagagcaacttccctcccgtgtcctgcagcggctgtccactgctggggccagtggccttggtcactggggatggggtgcggccttcctaggctgacatccctggatctgaccgatggtgcagccgccccggcaggtgcaccgtctcctgtgtgcctgtgtgtggggctggctggtgtcatgcctgtggccccggtacaatgacctatgtgtcaaggacgctgcctggggaacgtgaggaaggtcctggtggacaggcggaagggagttccctggtagccagagctgatgtccagggtgccggcgaaggttttgggggtcgtgtggttgcttctagctccacgctccgagaactgtccattgccccctgtggcttgagggcggccccagcctcggacccaccctcccacccatcaccaggcccaccctccctcccatcgccgggcccaccctcccctccagccctggacccaacctccgtccccagccctggacccaccctcccgggcccacctgttcccctgagccccagaccccatccctcccatccccgggcccaccctcccccgcatccccaggcccaccctccccgccatccccagacccaccctccccccgagccccagacccaccctccctcccatccccaggcccaccctccccccacatccccaggcccaccctccgccccatccccaggcccaccctccccccccatccccaggcccacccttccccccatccccaggcccaacctccccccccatccccaggcccacccttccccccatccccaggaaggctgcgctcctccctgtggggttggtgcctggatcctgggcaggctgcccactgcgttcattctggaggctcccatgggaacctggcacctgctcccgctcttagctaccttgctcagcctgggaacagatggagctggcccggcccgcccctgaggcagctgtgggtcaccacttgggccagttccctgcaggcctgtggatggggaagaggctgagcttctgaagcctcagggggccccaaggattgggcactccagctccaagaacgaatctcttgctgtgccgccccgcaaccactcatgtcccgggagctgcactttgaaacacagcctggacacccgggggcctgcccacctggggtgaggggccgtgtgtgggagcaggggtgtatggcagagagcagacaggactagggaaggggccgctgcaaggctgtaggcccttccggccctagagtgggagtgggaactgcccatagctgcagtcactgctgaggcccctcctgtgcccagggctggagtcatcagtccaccgaggcccctcctgtgcccagggcaggagtcatcagtccaccgaggtccctgtgtgcccagggcaggtgtcatcagtccaccgaggcccctcctgtgcttagggcaggtgtcatcagtccaccgaggtccccgtgtgctcagggcaggtgtcatcagtccaccaaggcccctcctgtgcccagggcaggagtcatcagtccaccgaggcccctgtgtgccccgggcaggtgtcatcagtccaccgaggcccctcctgtgccccgggcaggtgtcgtcagtccaccgaggtccccgtgtgctcagggcagccatcatccgtcaactacagcactttgtgtgccgcatgcggacagggtttcagaatctgtgtcagcccagcactcggggcctggcggtcatcgggtagacccgtgcactgcacctgaaacccactgacaccctgagtgacgggggtgtcccgtgaagagccagtgctgagttgcgggcgggtggaggccaggctgagcctcgtgcgtgtggctgcacggcagggacgtcctgcgtgacagggacgatgtgcagaacctcaagaggagcagggaccacttgccaggccaggggtctcccgggactcccctggggtcactgtggggggagtaacaggggatctggcagagttggcaggaggtgggggaggggtgtctgcttctgagccaggaggatgggccctcgctggacagtgggtatttgagacagtgcccacagcctcccacgttccccagggcctcccaggctggctgcccacgtgcacattccaggctcggggccacgcccagctgactgcatgacccactgcccgcccagccaggcgcatgtgggagccgaggtggtactgcagtgggagacaggtcgaggctcagccgtgggaggccagcgtggcagaccttcccccagggaggaggcactgccgtttgtcaggatggtggggtgtccgctgtagaaggttttgtcctcaaaggcgtgcgggctggggcagggcgctcgaggtgtgcttcagcacccccagaagtttgctgagcctgcagcatcctggccctgagctctgtggccccaagtggggcttcctgggtgaccctgcagtgggaagtcccctgaccccccaggtgatcttggtccttctgctggctggcgtccctccctcctagacctggccgtgaagataccccaagttcagcatcctgagagacccaggagcagcccctggttttccacggcagggatgctccctggaagggcagcctggggggtgggttgtggccacctccccagatctggcaagaggaggaaggcgcagggctggcctggagagggcagggcctcgacgtgcggggctgttgggaaaatgtgctgtgtcagaacgcaggagggatgagggggatgaggtacctggagtgggggtgcccgtcaggcagccagggctggtgcaccctgggtgggggctcctcctccctccccaggggtgagaagccaccaggcctcccttctccaggtgggcaggaggaaaggaagggtcccctcacccctggccgtccccagcccccatttctctgcacggtgccctcccactcctctgtccttcagccctgccccaggggcacccccgacccccactgactgcccactctctctcctcctgcccacaccacaggcctcctacctgcaacccttgacctccccagacgtggtgagctcaggcctgggggtggttgggaggggtctgggggtgtggccattgtgtcccccgcccagcccacgcgtggccccctggctttactaacccatcaggtgcctgtggctttgagcctctgtctcctgcagtctgtcccatcacaggactgagtttggagtctcctgcccaccgcagtagcaggggcaggatgtggggacctcggtgcgacccccactgcccccagggctcttccccacgctccaccaggctccgagggcaccagcagcctgtgtcctgaccacctctctggcggttcgcttagcccagggcttgcccttgtctgttggggtgatcataaaagctcccgtctcaaaggggtctgggaaggggaggttctggagccccgacgttctagcaggagcttgcagttgaggacctctggctctgggttcatatggccccagaccctgctggctgagccctcttggtctctggccccggaatgtcccctccctgccatctggggcctctactgtccccctggagccctccccaggaccaccacccccactcctcagtggcaaccccttccaggatgcctgtgtgtccccggcccggccgcagcagccctgccttcccccactcctcagtggcagccccttccaggatgcctgtgtgtccccggcccagccacagcagccctgccttctggcttctggcctcagaacagctgctctgattcataaaaatcatttttaaattttctttctcagttttgagagtatggtcttattgggaaaaagaaaggggctttctgtcgctgggctgggaggaccttttcccttcctttctctgccccctgcccaaagatgaccccaccctgccgactgggcctctccggcacccagcccctccctctctgctccccgcccctccatcccatctccccactccctcctccttccctggctccctaacttcccctctgggtcctcagaggtggggacccaagcaggcaaggatgggggcaccagccaggcctttggtcttcgggccctggccagtgctgccctgctcaccagcccaggggccaccagccaaggcccagcagctgagggacacgcatagctgcccacccgcagctgcccccagaggggaccggcgggaaggagcccactcctctgccagctgactgcctgctccccgcagagagcggatgggctggaggcctggacctctggaggggggaccggggctccgtgcctgggaaacggtgtctgggaaggaggaatttacagacttctgtttaccaaaatgaggcctcgtaaaacatttaacagcagccaattaaagggggacagctgtggaggtttaacagtaccccccaaggccctgccccttgccctgccactcccctacccccgccccaggtcgctcccaccccgtccctctcagctttggtcgaatcttccaggattggagtttaatctggtaaacagctgctccagatgcagctcccacacagaccaggccagtcggccaggctcgagcctcagccccgtgtcctcagctggagggcagctgcagggctgcaccagggccagggcgccctccccaggttcccagacttggcctgggatgtgcggcctcacagggagatggggcttcaccctgtcaagcaggcctccgtgtcgcaggacttcccagggccttccctgtgctcacgccctacacgactccaaatgggacgtgtgtggggtgcattcttggagctggtgacccagagcttgggtttcctggagcatctcctggggctcaagctccacagatttccctgggatccactgagccagagaggatcgaacagtgcctgccactgctgggggacccactgggattgcggtgtggggtgccccagttggactagggggcctgttttccagggaagattcagagcaggagttttagagggtgagggccccccgccctgccccgcccagctgcgttcattccggcaggttgaagctgtgggttgcctcaaacgtcttctcctcaggcctacagaaggctgccagacccccaaccacagccagccgctcggccctcacgttcaggcagctgctaaggcaggccggccggcactggcaccacctgcactgcacggagggctggggctggggctgggcgggtctgagtctcagagctctgccagtggcctggggtcttgctggggaaccagaagccacactccttgtggctggtgtccctggtgtccagcagacatgctctctgcagcccctgggctgggttctggtgcctgcaggcctcccaggccatgctcagccctgtcctgacctgccagctgtgcttcatcccttgggtgggggcaagtgtgccccacacagccagagctgtcccaaggcccagggccagccgcgtgggtggctgggtgtggctggctttcctgtgctgggcaggggcaggccgctcagaaatgtggctgccttgagggacagacagaccccttagccaagagaggggcctgtctggcatgactcggagtcaccgcctggggttttggggctggggcctgtgcaaggaactctttgcccccgtcccttccccaccctgtgcagatctcagagccggaagaggcctggccatggtgggaactcggcgtcggatggacacacctgtgacctccagccagggtcgggggaggctggccacaccccagcagcactggcccctggcctgggctgtccactgggccctggggcctgccttggggaggccaagtccgggcctggttctcctttggccagggccttggcgcagagtctgtccaccgtgccccctcctcccacaaaacctccccagagtcccttttgttgcccagcctgggagcttccgcgatcctgagtgctgctaggagggaacagaggccccctcgtccgtcctcccctctccccagcccatcagcaattcaatttgtgccgcaccggagggatggcattagtggagtcagagttaatatgatgtattgatgggttgatttccccccggcggctgcgtgctgggctctgcgggacatcgctcctgggctgcctgccggcttcttgcctccctggggtcagggcgagtgtgggccagggggctgggagttgcctctgcaactgggtctcttgcttctctagctccggggtaccccagattttcggggagtctggcatccaccttcctacccgtgagccacttggatcaccatggaaacagcaacgttctctatgggcagcaccgtttctatggaacccaaaaaggcaagtgcagcatgggaccggcgtggggagcaggcatgctggaggtggggagggggcgcaggagcttctggggcacaagggaaaggccagcctaggttagccctcccaccaggtgtcatcgaggccagggtgggggctagaggagagggtgggcctgcccctcaggatttaaacccaggggcccaggaccacccccaggcgcaggttcagttcccaggtcacgctgtctcaagacctctcactgctcaggtgggagcagctgagctggtgcccaccttcctcatcaccctagccccaccggcttcctcaggacctggccttgccctgcagcccccagcagcccggggatggtggggtggctcaggaggaggatgcatcctgtgggggctggaggaagcccacagaagcccgcacttcctggcttacacacccggtggcctcggctagacctgggctgcacgaggcccagcccccagcccccagccccccagccccgtgtcctggtggacagaggggctgctcaccccattggcagcaggcatccctgaagaagggatgcagactttgtctttgctgagaagtcagagccggtggggccttggggaagaggaagctcaggcccagcagagccgagtcctggtgccagcgagtcccctcagggtaccggagagggcctggctggaggtgggatgggtgtgggtccttatctccaagttgggtttcctctggtagggcgacatctcatttgcattttaaaaagttctccttggggtgacaccaggaggctggagcaggaagccatcggttagttaccaggttccagtgagaagcgatacaggtgtggggccccacaggggccggcatcggtgatatctaggagggagattgggggcagggagggatagaggggtctaggtggcccccggtttctggcctgggctatgggagggtgcacctggggagcagcagttggacggtggggtgagttctgcttcagtgcagaggggctggggcgtctccccaaggggatccgagaggtgtctggacacacggggtggggtcagtggggaggggtggactgggaggttgtcccgactgtggagagggacgcccaggctgtgggggatgagaagggaggtggggacagatggtttccgcacagctcctgggagcccgggagcccaggagccctggcgtttagggctggagctcagggtgggggcagaggagaggcccagaaaggcccccacagggcctgggaggcggactagacaccctgaagggaacagagggaggggaccccagtgagcctgtgctcatgagtggccatgatgaccccaactctgagtgtgagctgtggggtagggacccgaggccagtctgcccaccctctcttggctgcccctcagccccttctccccacctcatactcactccaggacctctgtgtggcctgcacttcctcgcctgcaggagcccgagatttgctaaggctcaggagggccttggccttgcccttgtcagccagctgcaggggagcaggcatgggggccaggaactcaccaccagccccacccaggggattcagctctcacccaggacaggcacccaaaccggtctcctcaccccacaccccagctcctgtggacgggctctgctgcccagaggacagccccgcaggccccgttcccctagaaccgcgtcagccccagcgcgtgcagttattttgacagtgtttgtcaggggcgggcaggtggcgggtcccaaccccagaaacccaacccctccaccagcacaggggactccctctgggcagtgggccggccaggcctctcggctttcacaatattttggtggagctgtgtccaagaacagtatttggttttggaaatggagctaattaggtttcgctggggctagccccttcccgctccccttcccccttgtttctaattagcaggaaattgacaaggaatttacatgcctgaggacaattttacaagttccaaatgtttcttttgtttctccccttgtcagctccctctgctcttggcaccaccctgctgcccacccacccagctgggtgtggagagggacagcacccccagggtccccagaggcggtggcctggccccctctgtggggcgatgggtaaccccagggcagccgggagtgtggagagcttggggcagaccctagccgggaagggagggcccagaccgagggcccaggctgggcaaccgtttcagggaccccagacactcaccccccaccaggcagggtgagcacagctgctgctctctgcccccggagccactggcctttctccatttcaacatattaccctagccccagcagcctgagacacccagatgagaggccgaggggctgggagctcccagggtgtccagcaggtgggtgagcccttcctccgcgacccacccgtccttcctcgcctctcctctgggggcgccaggagctgcgcctgccacctgtccctggtttccaaggtcttggtgcctgtttgtaaagacccagcagagatgctctgtaacactcactgcctgccccgcgtcccccgaaaatccactgcctgccccgcgtcccccgaaaatccccactggcactgggccaggcaggggagagactggcctcgggtttgcatctcccatctctgaggtgtggggagctgaacatgggggcagagggtgagtgtttcacggggacagaactgcggttcggggaggtgagaggttctggccatggatgctcgtgacggctgcacggcagggggagtgtgcccagtgcccctgaactgtgcaccaaaaatgggaaattttatgttacccatatttcactacaattttataaaaacaaaagcaaaaaccagcccggcgctgtggctcacgcctgtaatcccagtactttgggaggccaaggcgggtggatcacgaggtcaggagatcgagaccatcctggctaacatggtgaaaccccgtctctactaaaaatacaaaaagttagctgggcctggtggcgggctcctgtagtcccagctactcgggaggctgagacaggagaatggcgtgaacccgggaggtggagcttgcagtgagccgaggtcacgccacagcactgcagcctgggcgacagagggcagagcgagactccgtctcaaaaaaaaaaaaaaaaaaaaaagagcaaaaaccttccctaggctgtaacctggagtcagtgccagctggtgtccgggaggcacctggagcacctgtctcagggagtctttctccagcctcacccctaaggcctcccattgaccttggctctttcccacacagataacttctacctgcgcaacctgccgccccagcccacgctgctgccggccaaccacaacttccccagcgtggcccgggccgcccctgcccaccccatgggctcctgcagccgggatcgagaccggggtgaggcaggctccctgcagaagggccccaaggacttcgaccgcttcctcgtgggcaaagagctgggcagagagaaggcgggcaaggccgctgagggcaaggagcggccagcggcagaggaggacggtggcaaggagcggcacaagctggtgctgcccgtgccagccgacgggcactgcagggagggcggccccgcaccccgaggggcctgcgagggccgccccaagcacctcacctcctgcctcctcaacaccaaggtgctcaacggcgagatgggcagggctgcgctagccagctgtgcagggggcatgctggggcggcctggcacgggggtggtgacctccgggcgctgtgcaaaggaggcagcaggccccccggagcccgggccggccttcagcgagtgcctggagcggcggcagatgctacaccacaccgcatcctacgccgggccacccccgcccctcagcacagccgccggctccttcccctgcctgcagctgcacgggggccctgacgggctctgcccgctgcaggacaaagccccccgggacctaaaggccagcgggcccaccttcgtgccttctgtgggacacctggccgacaagggccgccccttccaggccgccgaggcctgtgccgtggcaggggagggcaaggaccggcacctggagggaaccatggcccccgaccacgctgcaccctatggagtctcctatgcccacctgaaggccgagggcaagggcgagcggcggcctgggggctttgaggcggccctcaacccccggctaaagggcctcgactatctcagcagcgcaggccccgaggcctccttccccggactccctaaaagcggtctggacaaaagcggctacttcgagttgcccacctcttcacaggactgtgcccggcctggtcaccaggacccgctgggcgggaaggccccccaggcctgctgcactttagataagactgttggcaaggaagccccggccggccccccaggggcacagaaggtggcccgcatcaggcaccagcagcacttgatggccgccgaggtggagcaggggggcattggggctgaggccaagcgcaagtccctggagctggcatccctgggctacagtgggccccacctgcccccatggggtgtccaggcaggccagggcaccgccatggccatcagcgaggagcgcaaggctggcgcctacctggacccctttggcagtggcctgcagcaggcggctcttctgccccaggaactgcctgcgccgccggacgaggtctcagccatgaagaacctgctcaaatacagcagccaggccctggtggtgggccagaaagcacccttggtgggcctgggtggcctcaaggccagctgcatccagcaggaagcaaagttcctgtcctctaagggcccaggccagtcggagaggccggactgtgcccgcagcagggagcacgacaccacgcacggcgacggggaggtgcggcagccccctgtgggcattgcagtggccttggcccggcagaaggacacagtgagccggtctgaggcagcctacggcaccaacactgcgcggcagggccgggccgcccccgccttcaaaggtacaggccctgcacagagagggaggcaggccgggacagtctagggggcccagctggccctgccctgcgccccggctccccagctcccacacctgcccttggcagaccctccgaggccccaggaccaggggatcctcctcagtgcatcaggccccccagctcgaagcggggtcactgcttgccttagctggtggctccctggccgccccaaccctctcccgtctgctgtctcgaccctgtgcaggtggcggtgggccccgttccacacacgcgctggacctggaggctgaggaggagaggacgaggctatgtgatgaccgcctggggcttgccagccgcgagctgctgctgcagtgagagctgggcctgtggccctggagagtggggctaggcctgggcttggggctccccactcagagccacgtggagaaagaggggtggtcatggctggggcagcagattctatggccggccgtgggtggggttctccccacccctagagcctttctggagtctcacccggggttgggggtctcagttaaccccttgcagcggtcaggttacccactttcaggggccaggagatggcccccagtcagccctgcagagcactgaggctggagcctggggttttccctgagcctccaggtcccgttctccctcccaggttgatggcagggggtgggacagggagtcaggcattggcaccgttggtggggctgagccccaggtcttacagagacaacaaagggccgggggtgggatggggagctgggccttggcgccggcggcagggctgagccccaggtcttacagggacagcaaagaccgcgtagagttcgcccggatccacccaccgagcagctgccctggggacctggccccccacctcatgatgcagagcggccagctgggcggggacccagccccccacacccacccccatcccccctggctgccccgcacccgcagcccctccctgtggatgggggggcactcctacggtcagtgatccaagggcgggggctggcctggggctgatgagggttccctcctggtccccgagagtgcgaggcctgaccactgtgccctctgcctcccaggcctggggcaccctgccctgcaccagaacctgccccccggcttccccgcctccgtggctggccctgtgccctctgtcttccccctcccacaggacgcccccacacagctggtcatcctgccctcagagcccacaccccacagcgccccccacgcacttggtaagggcccctggtccaggctgctgtacttggggggtgctgttggaaggaggggcagccgggggtgtgctggccagggctcaggagggagcggtgggcttggtgggctgaggaaagggtggcggggaagcagccccggagctgtcccctccccagccaggctgacccctcctgggccctgcccacagcggatgtcatggaccaggcgtcactgtggccccccatgtacgggggccggggccccgcctctcacatgcagcacccgggccagctccctgtgtactcgaggccgcagctcctccggcagcaggagctctatgctttgcagcagcagagggccgcccagttccaggtaccgcccctagccacgctcacctgggccgggcacttctccccaaccctgcctggccggacctggctccaggagacccctgcatgcctggcctctggcaggatgaacccaagcagggggcccactggggtcaggggatcctgagcctgaccgagcttgcccccatccctgacagcggaagcccgaagaccagcacctggatctggaggagcccgcccaggagaaggccccaaagtccacccacaagccagttgccttaacccccacggccccgggcgccccctcacccgctgcaggccccaccaagctgccaccttgctgccatccgcccgacccaaagccccccgccagctcccccaccccaccacctcggcccagcgccccgtgcactttaaatgtctgccctgccagcagccccgggcctggctcccgggtgcgcagcgccgaggaaaagaatggggagggtcagcagtccacggccgacatcatcacatccgaaccaggtgagagtagccgcctggcccggcccactgtgctccgctccaagccctcccacccctgcccggcagggctgcgctgaatccgggctgcctgcagggaggcgccacacctgcccagacccagggcagcatggctgttcccttcctctctcttccctcttcccagtcctcccaatgaccttgggagaagcacacagtgccccagccgcccccttcctggccgtgggctgacgaaggcgggaggaagacggggtcccgctggctgtcgtaggggccctccagcaatgaaggcggggcctgctggtggtggtactggcaccctgggggcactgggcatgggacttgaccaggctgccattcagggtctcagcaaagctgggagagggaggggcagcgaggcggggtgcctgggtgggggggtctcgggcctggcctcggcccctgccacccgcccatccactccccaccagcctatttgattctctctgagtgggactgagaggtcacactggaaaccgtgtggcgaacataaaacccgtcctagtttcacagtcaggagatggagctagcagagggtttttccgtttttttcccttcgttttttttttcttttttttgcagttaatgggacatgatgcctctgacatgctgccggcttgttctggttcagggaaaaccctgattaaagcatcatgttttacaaattcccccttttctggttacccacagcataccatgccagagatggctcctgaggccacccccagccccggcagccagggttgttggggggagcttcaaggccactctttaggggaatgagggcctggcctcaggctgctcacaccttttttttttttttttttttttttttttttttttttttgagacagggtatctccctatgtcgcccagtctggagtgcagtgacgcgaacatggttcactgcagcctcggcctcctgggctcaagccatcctcccacctcagcctcctgtgtagcttggaccacaggcatgcaccaccacgcccagctcattgttctttaatttttttgtagtggcacgtgctcactctgttgcccacgctggtctcgaattcctggcctcaaatgatccatccacctcagcctcccaaagttttgggattacaggtgtgagctactgcacccagccaggttgcccccttaattaacgtaaccctttccccgccaccagtcttgcagacctgcagctagcccagggcccttccgcacgggcttgggtctgagggttcgaggccactgtcctccgtcctatcgcaggacaccccctcaccaccactcccagctccctgctgacctgtcccctcctttgcagacctgcctcccggatacctgcgccccatggctggcctgggcttctccctaccctcagacgtgcactcttctaacctcgaggaccctgaaactatgcaaaccaccgccccgggggcccagcctgagcccacaaggacattcctgcctggggagccgcctccctgcagccccaggagcctggaggagcccgggctgctctcaggggccagggaggccacccaggaccttgccgccaccccctaccctaccgagcggggaccccaggggaaggcagcggaccccagcccactagaggggctacaagaactgcaatgtgcggccctcctggaggcagggggccccgaggccaccggccaggctcattctactcagggaggggcacgagaagagaggagcagggaggagggggagcaggggccctcgtcaggggcctcctcccaagtcctggagcagcgagcagggagtccgggtgcccttgaggacgagggggagcagccggcccctgaggaggacgagctggaggaagacgagctggggcagcagagcatggaggactcagaggaggactgtggcggagctcccgacaacagccacccacccagggcgctaccaggcctggatgccttggtggccgccaccatcaacctgggggacctgcccagcgacagcccaccggaccctcagcccccagcggcctctgggccccccagcacagtccccctgcctcatagctcagggattcatgggatcgctctgctcagcgagctggctgacctggcaatccagcggcagaggagtgagaggactgtgccaggtaagcccggtggttgccgccaccccccagagtcccagcagtgggacccacacgcctgcctcagggtcacctggccagacggcagccttgggccccgctcagttgtccccaaagtgtggtaggtcccctggagagtgtccgcctccccttgccgtccctcgtccatggaagtccgaggcaggtgtgccatctccgaatctctccgtcccaggtggggccctgggagcaggactaacctccatggtggtctcagaggaagggcctctcgggcagcacctcctgttggaagtggctgaacaggggctcgcgtcctggcaaggggagaggagagcctgccgcctgcctcctgctctgccaggcctccacctcctcagcctccacggctgctaccctggcctggggggtccagttcaggaaccgtcggctccccgcttcaggcccaggggagggggcaggaggctggggctcctgctgcagggaggcctatgggactgggagctcctgggctcttccgcccacccaggggccccaaggacagccggacaacagtgggcgggtccagagcacctgggacacccgagggccaggtgtctgcttcgtccaccctgggccttggtccgggcactccctgcggtccagtgctcccgggaaagcgcccgcttcctgccgtcttccctgtgggccccagagaaagccccggggtggagggcgtcccccagccgggcacggcgccgtggttgttgatagcacgaagctgacagtcttcagggctcggccgctgctttctggatgcataaagctcaccaccgcgatgaagagaatgttctcgaacagtgcatttccccaggggcccgtggtcaccctgtgctggatgaggctgctggcccgcacgcggcaggggtggttccgcagtgctgggagctgcctgccctcgggggtatctggcccagagtccctgcttctgggtggggctgtgcagagggtttgaggaagcttggagtcctaccagggtgggctccacctggaccccccagaggccctcccttgggcctccagctggcaatatatgagaagttagatagggcgaggtggaggcaccttggggcagggcctgagctgccagggacccgccgtgggagggtctcagggaccctcacctggcagcatgaggaggcgtcagtagatagcaggtcccgtgtgtatggccagagtggccggtctgcctgtgtgaatgcctgcaggacaggagcccgttcactgcatgaatactcatgtgtagaccacgtgtcccgggtggtgggccatgtggcttaacccagcatggatgtcgtcacactccggccaggccaggtgtcccaatccccagggtgtgcagaagtggagtcagggccagctctgccctccgggtctccacctcatggtccccccctgggcccccacccctgcccctgccctccccttgtccccgttaatgggcaggtctctgcagctgctgggctcagagctgatccctacaagtgtagcgatcacttcaattgaaattaattaggaggttggttttgtcctgtgccagacagcaagatttgcagagggggaagtggagaaaaagcccccaccatcggggccgggcaagcatagagcccccaggactggcagaaccatctgggtgaggccacgtgggagccacacgcctgtagcctgcaagggcaggggaggcacagaggggcttctggccaactgcagtgaccccaggagacctggggccttcagtggaaggggcctgcagatgtgcctccccggctgctgatggcagcagctgctcagcccaccccccctcggccctctctccccctcccattccctgcggatcctggacccagcagcctgagtgttcccttggtccccatcagatctgtggtctcggtccagagctttgcaccccagcatctgcccctccgagcacctcctggcttcttagtaatgacttctggggatggatcaacccttggtctgggcttgtggccccctggccctccccatacttgaggagggaagcagccacgcaccatggagtgccccagcctgggcgctcaggtcagtgcctttggtggaatctcaggtgcgtgccccagctgtcaggcgctgatttgtcccatcgtggatggggttctcccgcactcctgcttctggctgagatgagccatatctctggggagccccggtccgttaagtggagcgtggggttctgaggcagagactaggtttggggtgctcgttgctgtgaggttatcgttgctcctgggctttcccaggggataccagcacctctactcaccccacaggggttccgcagttctcctgccttcctggccatcaccacccacccccaccgcaaggtgtctggctcctgtctcctgctggatgtccttgtgggatcagcccatggggaccccgttcctggtctctgtggtcagccctcagggctggcttcccctactcaggccctgagtccccaacctgggcccgaccctgcatggacgccagcctctgctggcccatgctctgaccccaagatgggccatcccttccccaggccactgcctgggctgttgggctgccgctgttcctgcggtcactgtgagggtagctcccctgtccctgcccccaggttgaggtcccagaggatgcggccctggcagccccttcctcctgacctgtgttcagcccatggccctcctgcctgccccagggctggagcgtgctggaaagggcttggcagagcccagcactgtgttcagagaccgggcaggggcagggatttggtgctctgagggaggatggaggaatggtggctgctcctctgagaagggtcacagcagatgagactgcatccagaaacccctgcccgctgccctcctcacaaggaatcgagggcctggggtcccagctacccaggaagctgaggtgggagggtactggagcccaggagttcgaggttgcagtgagccgtgatggagccaccacactccagcccaggcaataaagcgagaccctgtctcaaatttaaaggtatcgaggggacttgtcccctccctctgcactgaccactggcctccctgcagccattgctctttaggtgtccacacaggcgagtggacggaaggactgatgggcagatggacaggcaatggcaggtcttagctgctgggggacgccagcctccaccacctggatggagtgatgcccaggtgctgaagcccctggttccaaagccatctctccgcgtgactttgaacttggttgaagccacgtagacagacgcctgttggaaccgcaggcttgagccacagcattcaactcggttgaacttcagcagcttccgtgcacgaggcctcagtgggctctcgtagcactgcctgtgtctctgagggccccagagtatcccttcccagggctgccgttcgaagcagggcccccccggtggggggacacacaggcgtttctgttagaagctgtaacgagcagattgcttttacttcgatgctttggggcctgtcttgctctgtgacacagaggaccctgccccgtgggtcctcccagctggccctgccttaccaccaagggagtgtctccccagcatgcagcaaaacaggggtgctgggtgtcagccctggtgcccacctcactcttcccggtctcctgaccctcatcccggtcttcaaggctgggtggcttcagggggccagggctgacatcaagagcctgtgaggggcagtgtgtgcccagttatgcccatgctgaccttcccatgccgcacagaggaggaagaggacgtgctagccttcaacctgcagcacctggccacgctggccacagcctggtccctggtggaggccgctggcctggacagctccactgccccagcgcagccgcccacagccaacccctgcagcggccccaggctcaccccccgcatgcagatcctgcagcgcaaggacacctggacccccaagaccaagcctgtgagtggaggtcccagtgcccacgtcgcccagtgcgttgccacagagccccagcctgggccctggcccggctcacaggcccctgtgccccccccaccaggtgtgccccctgaaggccgccatcgaccggctggacacgcaggaggtggggatgcgcgtgcggctggcggagctgcagcggcgctacaaggagaagcagcgggagctggcccgcctgcagcgcaagcacgaccatgagtacgcctggcgtggcgggggggcctgggagggtcgcagcacccccacccccgggaggcgcccacagtgctggggccgatgtgggaacaggccaggattgggctctgccccctacctgtgggcagacaccagggtccatcggggaggccccccagaggcagtggggcccaaggagggaggcattcggccagcagcgagaccaagtggcagggccaggggtctgtggaagagccgcttgtcagagcctggtgtggcaggaggctggccgcagggtggcgggtgaggggacagtggcagaagggggagtagggaggactgggggtgctgtggggccagggcagaagttgggggattctctgggggaggggacaccccgcagttgcaacaagggcaggggcaccacctgaccagtgtgtgtggatggtaggaggtgggggcggcgggggcccctggctggccttgccctctgcgtgaggggtcaggctccccaggccgagtctgggccgcatctttccccacacccagtagccctcgaaggccaatgccctcggctggaaccttgtcggggagctgggttgtgcatgagcctctgaccatcccccctgcggcccccaggagagacgagagttcacggagccctgcacggcgggggcctggccggccgaggaagcgcaaacactcaagctcgctgcctgccccacgtcccacggggccgctccccaggagcgatggcaagaaagtcaagtgagtcctgggcactggcatggcagggcgcgtgtggccggccctgggccctcgaggctggggagcagggtccaggctcccctgaggcttccaggctgctggtgccccttcacacctactctgaaggcctggccctgcccttcctagaccatcgagagtgaccagcagacagagccctgctccagacaggctttgcccttctggcagctcccagcaccaccctggcccgggtccccctctggaagtcacggcccccaggcccagccacgccggctctgcacacctggctgtggcatcgtccccgcccggcccccctggagtgtgaggcggtgttgcgtgcaggcctctttatctgcactgtataaagtcgttggtcacgctgtggagctgctcacggctgccggcgcgatgttattatccattacccgcccggcgcagtcgttggcgcactcccgggcctggtataattgtccttctcggctacaaattgcctctcccggcaggcccatttgcataaatcctccgagctcctccaaacacgattggcgcgtgcgtgtgcgcactgcatcaatcctgatgatttggtaataatagttaaatcggcactaaatggttccttcaattaagacaggcaaaaaattaatctcagggcttcatgtcacaaaacattagcaaatgcagagaaggttacggggaggggctgtgtggctgtgggcagtggaggggtcaccatatggctgcccccccccagagctgcccctgccctgcccaggtgtctcctgggggggggtctcctggggtctccctttgagaaccagccagcactgtgggaactgctgggcaggacagggcccctggaaaccaggatctggctagaaggcagcagcctcaggacagggagggaaactgagtccaggacccctcttcccgagggtcagggccccacctcacccttccacctcctgccctcactcatccaggcagtggtggcagaggcagttggccccgggacgggccttctaccatgcaggaagtcggggagcgggggcccaggggtgccttgtggcccatggcttcctgcctggcccctcaggcctcagaagcccagcctcctctgtgagcaggaaggtggaaagggacatccggccacgccaggccagggccaggcagggctctttgtctccatctgggattcattttcatgagcagctgggtatccctttgcacctgtgggcaggtgggggttgaaaggtgagaggccaagcccccagcccctgtctagccaagaacaggcagagagactccccaagccttggcttctccatgtgaaatggggcagtgggaggttctggggagggtgggtcacccacacaagagggggagcccaggatgtggggggatcaggtgggacctgttttggggcatctggaggtagctgctgggcccatgtaggctggagttgacttctgccccagctcccagcctgggggacagcacagctctggggcatggggaatactgaggctcagcctccgcagtgtccagggctccatctgggaggggccagggatgcagaattccatccttaagacccgcgtggaggacagaatgggctcctgagagggcctgagcccggcaacggggtccctggggactcaggggaaagcccaggcttctctggacaccgcccccaccccaccccacccacctgcccctacccccgcccctggtgggactccggttggcacgtcctcttccagctgtggcggaaatgtgggtgcagttctcacaaacctgcccggtgcctgccccactcctaagggtggtagtatcaggccctgaacacccgccaagggccgggcccggcctgcataagccctgccccagactcagacaggcacatgtgtggctgtcccttgttccaggtgccaaggctggggctgcagccccactcaggccccagtagcagcagagccctggctcctgagcactgggcggcccctcagagccctcaccggccccagcccccgacacctggcctctgggtcactgtggctaggaccagacagcactgccagggcgttccttcctatcaggctggaaggatgggatttgggtaacagaagcgtgcccacttccagtatagccaagtgggggatggggcggatttgaggatatagggactgctgagggccggtggttggcaggcagaggggctggctgcaggcaggtgctcagaggaggtcagagctggctcggcccccggggcccctcaccccctgctctgtctgcccgagacgtggggcccttggaggagggtgacccacagtgtgacccactacagagacagtagggggacaaggctggggcggccgggcctgcatctgccctgcacccaccaccccatgcccccagggcggtgcggacaagcctgggtctgctgtgtgcggagctgcgaggaggcagtgggggcgagcctgcgaagaagcgaagcaagctggagaggagcgtctatgcgggcctgcagactgcctccgtggtgagtgccgaggcgcccgccttgccccagggcccttcaggtcccttcaggtcccttcctggcaggtagcagactctccccagccctgtgccgaaacccattgctcagatgagcgaagcaaggctggggagctccgagcgccgacagcaggaggaggagggtgaccctgcggtgtaacacaggaaggtctgaccgggtggccctgccgccacttgcccacgtcactccaccctcctcgtctcactccagcaggaaagcaaatgcccaggctacactctgctcacagagactccctggaacgaggccctgcctttcttcaggtggcccagggcacacttggtgtggcgggggctcctccggctgccggcaccccctttcttcttggtgtgggggggctccccacgctgctggcaccctgtttcttcttggcgtggtgggggctctctcggctgccgacaccccttctttcttggcacaacagctgcctcctgcccctcctctctccgtggcctcggcggggctggtgagacgtgggccccagcatacttcacctgtctgcccagggggctgatccttctgcccagatgctgttttatccctccctttagaaaagctaacagcctggccccacaacccacagccactgggccctcagcctcctccatgtcccctacgtggggtgggcagttggtgggcagtgggttgtgtgggaaaggccgcagcgtaggctccaggggcaggccctgtgtctctgggccagacatcccttcagcccctgtggatcgagggcaggggcctcgaggtaccagttctgagccgggcatcaacagagaggcacctaaccgcccaggggctgtggtttgcagagggcgccctgagagtgcagctgcccctccctgttcacaggagaaggcgcagtgtaagaagagcagctgtcagggcgggctggcgccctccgtggcccacagggtggcccagctgaaacccaaggtcaagagcaaagggctgcccacaggcctcagctctttccagcagaaggaggctacccccggggggcgcatccgggagaagctgtcccgagccaagagtgccaaggtgtctggggccacacggcacccacagcccaagggccacggcagccgggagacacccaggtgcccagcccagccctccgtggctgcgtcccaggaggcaggcaagttgctggcgtgagtggccactgccaggagccccggtcatggtcgctcgggggctggaggagggggcggcaggttcatggccgccaccagggctgggtcatggcttgtggggtgtgacaggtccaaggagacgttttcactgaacaggctggggaaggagatgaaggtctcacggaaggagacccccatccccaggcagagctcagtggctcagcatgcctcacccccatgtcagggccgaaggggaaggaaggacccccactggaagcatccaggttaaaaatagccctctcaacggccccagcccctgtgactgtagcatccggctgagctgaccctgaggcgttatctgaccaccccccccagcaaacacgtgtgtccagaaacaggagcctagaaaaatagaagcttcctttcttctgccagccccttcccccaaggtctcagatgcctgagaaagaacaaagggagggccgcttggggctgggggaggggcagagggccatctgggcggaggacagcagaaaaaggggaagggactttctggggagggggccccagccctgcctggtgggtgccctattgcccagggtataagaaaaaaacacccctccccacacccatacaaatcccttcaggctggaggccaggacctcaggcacctgcccccaaagcagccccacagagcggcccagagggtgacggtgaccagctccactcacagccccgccataaccgcatgcccagagggtcacctcccccacctctcaatggcacagcttaccatcaagtcatcaggacccctctgcctctctcccaggcagtggctatgacagtgaggactgcgagggtctcctggggacagaggcaccacccagggaagcagggctgctgctgcacaccggggccagtgtggccgtgctggggccctcaccctcctctgtggtcaagatggaggccaaccagaaggccaagaagaagaaggagaggcaggggttgctaggtaaccaggagggaggacaggggttgctaggtaaccaggagggagggcagggattgctagataaccaggagggagggcaggggttgctgggtaaccaggagggagggcagggtttgctgggtaaccaggagggagggcaggggttgctgggtaaccaggaggaagggcaggggttgctgggtaatcaggagggggagggcaggggttgctgggtaaccggggggagggcaggggttgctgggtaaccaggagggggagggcaggggttgttgggtaaccggggggagggcaggggttgctaggtaaccaggagggagggcaggggttgctgggtaaccaggagggagggcaggggttgctgggtaaccggggggagggcaggggttgctgggtaaccaggagggagggcaggggttgctgggtaaccaggagggggagggcagaggttgctgggtaacccgggggcgggcaggggttgctaggtaaccaggagggaggaccggcacagtcagcccaaccagccgggtctctaggatggggacccctgtgacggcctcctctccttcccacaggggcctgccgcctgtccagccctgagagtgaggtcaagatcaagaggcggtcggtgaaggccaaggtgggcaccaccctggagcgggccccagggcagaggcccccaggtgcgctgggcaagaagaaagccaagggcaaggccaagggcagcctgcgggcagagccgggggccacccccagcagggacgccctcttcaacccctctcgggccttcgcctgccgtgaggagggcagccagctggccagtgagcgcctcaagagggccacgcgcaagggcacagtgctgcagccagtgctgcgggtgaggctgggctctggggtgctgggcggagagggtgggtgcctgtgaggaaaggccttccccgccctcccccgcacgctggcccctgagctctgggtcaacctgaggctgtcccacccttgactcagccccttctctgcctgcccacgcgcagcggaagaacggggccctgtccatcacgctggccacacgcaacgccaaggccatcctggggaagggccggaagctgagcaaggtgaagcacaaggccggcaagcaggtagcagccccccactctgggagcccactgtgcacccacctgcaccccgcctgcaccccacccaagcctgactcctctggcccccagggcaagggccgggccgtgagccgcctgctggaaagcttcgccgtggaggaagactttgagttcgacgacaacagcagcttctcggaagaggaggaggacgaggaggaagaggaggaggacagcggccctctgagcgcagagcagagcgccgccctaggtgagcagggccaggaagggtgccagccgcctggggaggggtggtgggtaggccgtgccggccgctgacaccttgtgcccacagcgcgctcgtgtgccatccacaaggaggacctgcgggacgggctgcccgtgctcatccccaaggaggatagcctgctgtacgcgggcagcgtcaggaccctgcagccacccgacatgtgaggcctgggcatggtggggcagggcaggggcctggagggcaaccgagacccgtggcacctcacattccccaatgcccccagctatagcatcgtcatcgagggcgagaggggcaaccggcagaggatctactcactggagcagctgctgcaggaagcggtgaggaccgggccggcccgccccggggaggggcctggctggcttgtcccaggacaaaggaaggccttggcctgggccgcagccactcccaggcccagggaccagactctcaggcagccctgggccaggccccacctgctcatgggtcgtcgcccgcgttcctgcaggttctcgatgtgcggccacagtccagccggtacctcccgcccggcacgcgggtctgcgcctactggagtcagaagtctcgatgtctgtacccgggcaacgtggtccggggtaagttgcacccaaagcgggggctggggcaggcccctctgagacccacaggctcatatctgcccccaacagcctggcttccgaggctggcgagggcagaaccagctctctgcttagacagagtacgacaataaaatgagctccccaggcgccatgaaaaagcacagggtgtgtggggagggagggtgggggctccggcctccagccaagcagagagggcccagcaggaaggggccctgagcactgctgctgggggtcacagagtacgtcagggggcaccagctcccctgggcaaaacctcctgactacaggcaggggcatgtaggtccctagggcgaaaggctcaagggtcccacaggcaagtggccaggtgggcgggaggcgcctccaggcgggactcggctgggaggtgggcacgtgggcgtcagcacgtgtggggaggtctggttctgggctgggtggggtgacggtggcatcacatgggaggcactgcaggaggtggagaggaggcccccgctcctgggctgcagggcggctccactgtctgtgtggtcagggagcagaaccccagagccctcccctcaccctccccaccggctttggcagccccgcctccctgtttcgggcgcctactgggggttccagctgcaagctcaggtgtgccgtccacaggggcctccggtgacgaagatgaggacctggactcagtagtggtggaatttgacgatggggatacaggccacatcgccgtctccaacgtcaggctgctgccccctgacttcaagatccagtgtgagcctgggagctgcacggggcagggccctgcctgggctccactgtgtccagacgggctcccaaggaagggttggggtggcagtcaccccacagccatggcactgaagcccttggcccatgctatccacaggcacagagccctctccagccctgctagtgtctagcagctgccggaggaccaagaaggtatccagtgaggcacccccgcctagtgaagccgccacccccagcctgtcccccaaagcacaggacggccccgaagctttgaagacacctgggaaaaaatccattagcaaagacaaagctggtattttaccggacttcccagaatccggatcggggaaggcaccctctgggggctgggggaaccaggaggcccgtggggtaggcagggtccggggaggggcaggtggaggcagctttgtgggcccagctggggctgactctgctgggcttttgccctcaggtaaagccgaactcctaacctcaggtgccaaatcccccacgggggcctccgaccacttcctgggccgccgtggcagccccttgctgagctggtccgcggtggcgcagaccaagcggaaggcggtggcagcggccagcaaggggccgggggtgctgcagaacctcttccagctcaacggcagcagcaagaagctgcgggcccgcgaggccctgttccccgtgcacagcgtggccacacccatatttggcaacggcttccgcgccgactccttcagcagcctggccagctcctacgcgcccttcgtcggggggaccgggccgggcctccccaggggagcccacaagctgctgcgggctaagaaggccgagagggtggaggccgagaagggtgggcggcggcgggcgggcggtgagttcctggtcaagctggaccacgagggtgtgacctcccccaagaacaagacctgcaaggcgttgctcatgggggacaaggacttcagccccaagctcgggcggcccctgcccagccccagctatgtgcacccggcccttgtgggcaaggacaagaaggggcgggcacccatccccccgctgcccatggggctggcgctgcgcaagtacgcgggccaggcagagttcccgctgccctacgacagcgactgccacagctccttctcggacgaggacgaggacgggccggggctggcggccggcgtgccctcccgcttcctcgcccgcctgtccgtgtcctcttcctcctctggctcgtccacctcctcctcctcaggctccgtgtccacctccagcctctgctcctccgacaacgaggactcgtcctacagctcagacgacgaggacccggctctgctgctgcagacctgcctcacccaccccgtgcccaccctcctggcccagcccgaggccctgcgctccaagggcagcggccctcacgcgcatgcccagcgctgcttcctgtccagggccacggtggctggcaccggtgcgggctcaggccccagcagcagcagcaaatccaagctcaagcgcaaagaggccctgagcttctccaaagccaaagagctctcccggaggcagcggccgccctccgtggaaaaccggccaaagatctcagccttcctgcccgcccggcagctctggaagtggtcggggaatcccacacaggtaggtccagcgggaggcgggaggagctcctggttcccaaggaaaccggggcgggctcatgcgcccctgctgcccttccctctcctttttcatcttcctacttgatttcaagttaaaaaatgtggaaaactcaagggaagaacaaagacccatccatgacccagtgaggcagccgcttccgctggcccctcgctggagcccgtggcctgcgtgacagtagaaatggcttcatgtcgggccgggcctgagctgcactccgcatggtgtggcctcacttttccacgttgataagtggcgtggccagctggagagctgtgtatccccgcactcagatgcctgcgtctgtcctcaccagggcactgctcgggggcgcatgtggggccactcgtgggtcttttgccttcgtaaataacactgtggtgaacgtcttgtccacatgtccctgtcccagatccagtgtccagacgtcatgattccatgtgcgggctccgtggaggcgtggcccctgctccagatccatggctgccatggccttaagccgcggtgctgcggcttcctgcccttgtgggcgccctgcacactcacactcagactcacactcacacccacaccacaccctccatgcctcctggccgccacctgtccccacagccccccggcctctcagagccaccctgcccatgtcccccacagcggcgtggcatgaaggggaaggcccggaagctgttctacaaggccatcgtgcggggcgaggagaccctgcgtgtcggggactgtgccgtcttcctgtcagctgggcggcccaacctcccctacatcggccgcatcgagagcatgtgggagtcgtggggcagcaacatggtggtcaaggtcaagtggttctaccaccctgaggagaccaagctgggcaagaggcagtgcgacggcaaggtgaggcccggacaggtgtggggcccagcccccctcggggccccagggaggggacacgacagcagccagcactgtgccccaacacggagcacctggccccaccacacagcccccgctcagcaggtaccacggccctgcagggagccgcacagcccatgggcatgccctagagcagggctcccaggtccctccccacagtggggggctgtggcccacagcagtgctcagcatccggcaggtctagttcactcctgggatgtgtggcggcccccaccccgtgggccctccctgcctccagtgccagcctgagacagaaattgcactcagcacaccctctgctcctctctgagaagaagccattttccagaccatatgacacgtccatctttcagggaaattagtatttctctgactccgacagcccccagagggtccccggcaggttcctcggcctctggacagacagggctgcctggacctggtccctggcaggttcctcggccccgtcttccggccacacagaagtccatccggtgacccttacagagcatgggtgggcgggtggtctttcctggctgggcaggggcgcactggccaaggccggccactgatgccccgcgcgccttgcccccagaatgcgctgtaccagtcctgccacgaggatgagaacgacgtgcagaccatctcccacaagtgccaggtcgtggcgcgcgagcagtatgagcagatggcccggagccgcaagtgccaggaccggcaggacctctactacctggcgggcacctacgaccccaccaccgggcgcctggtgacggctgatggcgtgcccatcctatgctgagccgcccaccgcagatgcctcccacgtgcgccagggaccctgtgtgcggagcctggcgtcggccaagccaccgggcaggaggcagccccggcctcccaagggcgcatctgagcaaatatgcaaaagcccacagggcaagacccaggctttcttacggttttccctggaaagagcgctccaggtgtcggaatccagtcccgtcccatcctctgcggagggtcgggctgtggccctcatgggtccccggcccgccccacccacagcgccctccgtttcccgcaccggcagttcacgggagatttgaatccaagccatattccctagtacctccgactgtctcccaccagggaaagcagaaatcaggtgtgttgtctatttatttctctatgtaaatattgtatttctgcggggaaattttatggtaaaaagtggaaaagggtttttccccatccgcgtgacaaggtgtgtgtgagcgtgtatgtgtgtgcgcgtgtgtggcgatttttgtcctggggtttcctttggaaatgcactgttctcagcccagctgggttccaacgggggcacctgggacgacagaggcatctcggggcagggggcagaggccacgggagggtcaggtgggacccttgacggcaccctctgatctcttggggggacgaccgtgtaagatgaaagtcggtcaagtttatttgctttcagtgcatctcctagaaaagaagtgttggagcagggggtggtgatgaggggcccgtggggaaaggattcaagaggcaaagcccagaccagggagtgtgacaacagccgtgagcatctcacctgtgttcaaaacaagacaaagacgaacaaatattttaaagtattgataagaaaaagcaatgtttggattgtatctgctgaatcatattccaacctatatctgatttctgtttccggggccagttggtctgaggccaaggagtctggcctccacccagagcagggaggggctggcccctcgcccccctcaccctcgccgccctggcacactcgggaagcagggcccagctctgagcccctcctcacccctggggtcctaactttcctgaaagtagtaggtgccgtgagaaggggcagtttggccaggttcctgaactgggcagggctcggggcctatgagggcaggttcacagtcccaccagattctctcctcacccccaagcagaatgcatgcaaaagacaccccttttcccacccaccttattggtgcccccaaacccctggcctgctgcgtagatggtggtgaggccaggccagcagtgctgtggccaggggagaagaaaataaaacgcaggccctgcccttggggaaggcccctttctgggcccccttttccaccagccaaatctgcctggccctcggacccctctgcctgccccaacccctttggaggtttctcggccttttctgtgccacttggtggggcagatggcctgatgggctagtgcttggggcatagaatgagggtccccctgaccacctgagcccaaatcctggccccaggtgcaagcagcacccctcgagggctctgccccagtatccccagggaattcacacccctccccttctcccacagccaaggacagacaggctgcctggacctgagcccaacagccttcagcctcagaaacgcatggggggccacacactccttatatcctcccacactaaggttcccctggccccacgggagcttcaggaaagccccccaagttagccactgctctaggacgagctctgtgtcccccacaccacaggcctcgaagcagggtgctggtgggtgccctgtaccccaatcccaggtccccttggccccctatttttctcgggcccattggggcctgtttctcacctgctggctggaccccctgaagggccgttcccagaggctccccaggaggctcaaggctgggggcttatgttgtggtcgggggtccccgcctccagccccccgctcccacccccgagcctaccctttgtctcgcatgagtgcaatatttcattcccggtggttgtctggggaggtggttggacgaggtcctgcttgaggctcggggatcagaacgatgtcaagtgaagaaaaatgcacgggggcatgctgagccactggagttccagagagggccgaggagggtgcagccacggaggttggatcctctgctccgccgcctcgtcctcgtcccgcttctgctgggttccgctttgtccctggttttttcctttctttttctgtgtgcgtgcgaatggtgcggcccctcccctctcaccgtggttaacgtgacgaaggcacgattcctgtaaatgtgtaaactaaggggatggttggattttttttcaatgtaaacactaaaaacaaaatggacaaaaaaacacacaaaggttttatgaacagcagactctatgtaaaggcattttagtatcaaattttttattgataacttgcttaagaataaatatatggactattgtacaggttttcggtggtccagggtcctgtgtcccacggtactcctgggggttccccagggctccgggggctcagcagaagcctctcgttcccagagctggggcttctgggccaggcctccccaccgccccctgtgttggcccaagtgaagcccctcaggccaggaaagggtcatgtgaccggaatgggctcagagtggtcttaggggtggggtccctccaggaggagggcccctttcctggttgctctcacagtccctgtccagcctgaaccagtccagggccagagtaggttccactggagaggacgaagggcaagagcagtctccgagccgccacgctgggcagggtctcagacgtgaatgaccatcctgggaggggcggcccacggcccgggtgtgggaacacagatgagtgcacccccagctggagagagccctgttcatgaggctgcagacccagaggaagccggatgcttgcagggggtaggggaccctccttgttccccctctgccgccgggatcttgggaagctgcatgaagtcggtgcacatctgtcccagtgggccctgagtgcctggtcacagctgcgtccaaggccaggaaacatggtccttggaggacggagtccctgagtcagcagtgccttcctgggccggtgagtgcggagagaggtgctcagggaccggccgtgcctcaggctgctgtgagggcagggagcagatgaggccctggccgggccgagcgctgagtaagggggctgctggaccaggtttctgggtcaggggtcctctgtggcaagaaaggaaagacgggtgaggccagacactccctgtgggctcaggagaccctgacttcagtgatctcagtgacttttttcgggcagaatccagcccggaacagggaggaaggcctgcggctgttgccccggttcctggagccctgagccaggacttgctgccgcctcctgcccactccaggagcttgcctgacggagcaggtcgcacggagaggccacaggcagccgacagggactctggggcaagagagccggatgaggcccaggccggagaggtgacacctgcctgggaagcccacaggaaacctctgccagcaggtctcaggttcaaatcctccattcacccagcactgcctggtgccagcagtgtaccaagcagtgagccacagtggaagtgagcggcccacggccccaccttcatgacaggcagatgggagagaccagaacagtggggcccagcagctgcacccggggccacgcagctgagataacctcacccgtggaaccccaaggtcggccacccccatctcagccaaaagtgtggtatcggggctgagccaggcctggtggggcagcactgtggctccccgccccccgctgcatgtggcagcaggatcagcggggacttccgcacctggcaaagcagacaaagaactgactgtccctggggtggtccaggtgggctccctggaagaagtaacacctgggctgtcttggaaaagcccagggcagggcagggcagacagagggtagtcaaggaacagctggggtggccagcaggtggttaatgggggcggggggaggtaggggattgatgttagagctagagggtgacagaggccaaatctcaagcccctgagagcagcatggagcctgtcttctctctctgacaatgggtgccccaagggctctaagcagagtctgcagtcaaattgaggcactggttctgcagcctgggagtcagggttgaaggtcccaggccagccaggcacctgggggtcagggttagaggggccaggtcaactagacacctgagggcccaggccggcacaggtacctggggggaggggctggcaccaagagaaaggctttaagggtggcacagggccggactaggggtccaggtggggctgagggccggaaacggccagaggggagggggcctggctgaagggggtgccaccagtgagcccaggaggcaggtgacccgggcttagcgagtggggttgacggcaggcttaggtgggcccccgacctcgagggtctgacctccccaggagccctgcagggcacactgctgaatctaagggcaggactcacgcctggctctggccccgcaacaccgccgtcctactctccccctccatcacctctctgcccctcgtcctcccaccttatctcagacagggccatccttgccttccagaactgcctgcccccagaacaggccctgggcaaagggcagggcgttgtgggaaggacagtcagtggggctgggcatgcacagctgcggagccccaagggttaaacatgcaagactacactttgatcaagacaaacgggccattatgtgaaatgctggagcaagatgaatgctggcgctgggtgagtgagatcaataaaagtgatgttttatcaggtagaaatgacaacctggctgatcgcaattcgtttttaataccacaaaccaactggggaccagggggctttaattgttcatccccggcctggcgaggttgctgggggttggcggggagtgggggagaggcagccgcaccgctcagccgccgcggggtcaccgggcactggagctggccggacgcccatgctgggtgggcccctcaatggtctcctgagtctgtaccaggcagggtgaggagggaaccgcctctggcccctgggtgcgggctaagaaaacaagcagaggcagcaccccaggggaataactctgaacggccccatctcccgccaagcccctaccaggaacctgggcccctcggcctccactctccccccaacagccaccctttcccgctccccagaagtcccagtgagaagccagcacctccctcctttaagagccagaggacccagccttgagcttcccgtgccctccctatcggtgcagcctctgtaacccgccttaggctacctggagccataatggtgacgaggacgcgtctaggggagcgagcttcccacggacgggcgggtgggttgttcaaggcccaaccaccactcagtgcccacctgggaccacagcacagctgccagggggaccaggcctgcccctgcctcaggtggggagctgggccgggcaacgggtcagtggggtagaggtgcggccccggggccaggcctgcaggtgcagcctgactttgcagtggctcggacctcagtgtccgtgtctgtgaaatacagaccttgagtctctttccccacctataagaccaggatgaggctcacaggtggcccaagggatttctggatggatgcacaggcagagcccagtcagcatgggggtctcagcccctttcccttggcctacaacctcaagccccaggccttgtgtccccacccacacccaagggaggcttgagaggcccagttcaggcagaaagaggagcagggctggcctccaagcctccgctctgtcagtgtctcgtcacagagatcaggtccgcagtcaacgcttttgggccacttacatcacttccgaaggccagacacacttccgcttccattcagccccctggactcctgagggcctgagcaaaggcctcccaaagcaggaagaagcagcagaccaagagcagacactaaggctgggcacggtggctcaggcctgttatcccagcatgggaggccgaggcgggtggatcacaaggtcagatcgagaccatcctggctaacatggtgaaaccccgtctctacttaaaatacaaaattagccaggcgtggtggtgcatgcctgtaatcccagctacttgggaggctgaggcaggagaatcgcctgaacccgggaggcagagtttgcagtgagctgagatctcgccattgcactccagcctgggcagtaagagcgaaactctgtctcagaaaaaaaaaaaagaccagacatggacagccgccactcggagcccagagcagggtttgccatgagtatgccacatggtctcgggcctgatgtcgctgcggaactgggaaaagcatctgttttcttacattccacatccctctggtgtcttttgctcctttcctttgctgagactgagttctcaggcaggctctatcctgtgctttagagtagcggggcccactctgatgggcgtttcctgtctgttttttggaggttcccgagactgactgcacccatttacagaaaggaaaggcaggggattgacacagcaccctaggcttcctgggccaacacctactgttcagggaaaatctccagtcctgtctccctggacagagaggacagcagggtccctcacgatacccagggctggtggggaaactcaacacctccagcctatcccagatatcctagaatctgtcatcctgccagaataggcctgtgatgtccctgtcccatcaaagcaggggacagtgcatgctggttctcaacccctgatgacgtgatctgttcttggcaaggccacttcttgtttccttctctgacaaccattcctgtgtccatctgcccatccatctgtccgtcacttcaacaagtattaatacaaactcaagacctactgtgtgccaggcaccaggatgcagtgttgagaagattacacaaagcccacacccccaagaaactcagagcccagtagggaagaaggccagcacacagaagccctggcacccagcacaccaggaactccgagaagccacacgaagggtacaggacagggcccttcctcagtacagagcagctgcaagccaaagaagctggctccaggcccccagggagaggagcagtcctgctgcccttccaggaagctcagcccctagtagaatgcacttctggggggcatccacagttgcttcctttaactagtttaatccgaagacaaaagttgagctaaggcagcttgcagagaaaggaaggactagaggcttgctaggtaggactcgtcttccactggcgtcacctcagaaaacagtgactcagagaacagcctctaggcctgggccctcagccccagggcagactggctagcaggccagtgggaactctggtctcactgaggctggggctaggggctgggacttcactgagaaaaagtgttccagatggcagtggggtgggttaaaccagacgcctcccagagcccctctcccctaaggttcccagcagtcaggagcctcaggctctcaaacccttcctgcggtgacggaatggtctagaagcctactcacaatttggtttgctgagagggaaaagttaaaaccgccctttttatttgggagcctttgaacaagtttatgatcttgccccttgtcaggaaatctgttttcacttacaagaaacaggctggctcaggggccggcggtgagcagagcagtgagggaagactccacactgacaggctaattatatttttcaccactggcccggttagtccccactctggtcctgggcaaagcacccctggcctggtgctcctggaagcccccactacggcccgtctttttggggggtggagttggaaagccaatctacagcgagggtgcagaaggccagaggtgatgtcggggggcccggacaggaaggggacgagcgcccactgctgcgcaaccagagcccaggcagcctctgctctcggctgtgagcactgtggagcagccggggattctgaaggatcagcaggcaaacagtgctgcccccagacacgcagggctccgaaaagccaaagccctcagagggtgtccgaggccactgtcccagggccccagaagctgcaggaagagcctcctctggggcagagacacgccatgcacgcacgtggatccgaggacagccatgccactctccggtcacatgacccacgccaggccaatcacaacacctctgcttcctctgccaccgtgattggctttgggtcgggcatgtgacataagctgagccaatcagagttcaccactgggacccaatgagcgcacagcttttcctgcggcctcctgcagctaacccgccacgttctcttctcccagcgctgggctctcgccgcggcagaacttcggagtccaggatggggttgtagagcctgaggtgtcattcacattgctggtgaagaacaagtaatttgtaacaaaagcatgttccatgcaatatcaggggtatgcttatactaaaaattattcattctttatctgaaatttaaattaacctgacgtcctgttttatttgtttagagacagagagggtttcgctctgtcgcccaggatggggtgcagtggtgggatcttggctcactgcagcctccacctcctgggctcaagccatcctcccacctcagcctcccaagtagctgggattacaggcacgtgccaagcccagctaattttttaattttatttttttgtagagtttggcgggggagggtctcgctattttgcccaggctagcctcgaaccctggattcagcctcccagagtgctggtattacaggcatgagccccgcacccagctttgtattttattcattaaatctggcagcccgccttcacaacggcggttgaccttgaaagccagctgtccaacataaagtgggtctccccagcccacctggctgcacgcagctgcacccagtcatccatcacggggcagaaagagcccatgcaggcccttaaggctcaggaagctgctggaggccactcctgctacactgaccctccctcacctcaaacccatggcctctgcgaagcctcatcacctgttgaccgaggaggcagcagcctcctttacagagccagccccagccccaagtggatggctgcaccctcacagccccaccttgcaggacaaccctcccagagtgcagcacattgagtggacgtctccatgttcaaggccgaggcctacagagtcctgggcagtgcctgggcatctggccaaacgtgagggacttggaaaaaacacagggcaaaccagtcggggacaggagttggaggagttcgaggaagaggagggtcagcaggcatttgggctgtggctggaggctgagcatgtgtaggcccgtgtgagcccaccagaagccccactgcagaagagtttttcagagtcaggtgggcacatgacccacccgggggtgcccatcacctccctcccccccagccaatctgcagctcaccccacgggctcgcagtgtgcagagaggaaggtcaagcacaggcactccctcttgaaacggccctccctgtggctggtctggattcccactgaggaaggctcaattgtagaagccacaacggacctgaaatcccagcagggtgccatgcttcacgggcacctggcagtgctgtggggcacattgatgactttggtcccttccgttatggcatgggcagcaacttgtcctcatcaggaataagctctgctctggatgaggtcatgccatgggcctagagaacctctagacctgctcagggaaccccaccctgcccctgcaaccaaggaactcatttccaggcacaagcacagccaggagctaagtcacagccattccccatctcaccctctgtccctggcatctgcagcccaggagccatgcaacctggttggtctgaggcagggcaccccacaagccaggaaaagctccagtcctggcttcaggaggcaggagttggaggaggagtttcagcctctcactgtcacactagtgcccttaagctctgcctcccgtcctgactcagagctgcactggtctgccgtgcagcacccacggggagacatcgttacagcccagggatctggagccatttcatgttccatgggccacaaggtgagtaggagaaagagggtgtgtggttgccattccggcctgcagttgggcaaggagacgggtggagctggggacctcagaacgtacacctacgacatgctgatgcactggcgggagacctctgcaaccccaagagggcaagagccacaggggctcagacaccccaggaataaaactgggaccaggcacagtggctcccgcctgtaatcccagcactttgggaggccaaggtgggcggatcacgaggtcaggagattgagaccatcctggctgacatggtgaaaccccatctctactaaaaaatagaaaaaaattagccgggcctggtggctggcgcctgtagtcccagctactcgggaggctgaggcaggagaatggcgtgaacccgggagacggagcttgcaatgagccaagatcgtgccactgcactccagcctgggcgacagagcgagactccatctcaaaaaaaaattttttttaaaagttcggtcatcccaccagggaaagaagccacctgtgcgaggctcttgctggagacgagggcagcggtggtaaggtcaggagtgaaggcaatgccgataccagtggcagcttggggcccccagaggaaaaggagggcgcctcgactttcttgcctggggctatgtgctttctattttattttctttcctcttcttcccctgctgttgggtgtcaggtaggttagcagtgggtagttccagcgtccactccacagctgcagacgcccggcagaccctcacccgaactcaggaaggtggacatcccagacagcaggcacagctgagccgcccagctcatctcctggggggaaagggagtgtttttattgatcatcagatggctgcacggtgccctggagtcgtgggagtgggtcaggggaaatgtgtggctcccacgggggccgagtgtggcccccgctgccgtgtctgccccaaggccttcctgccaccttctcctggtaacagatgcccctgtttcgtgctggaactgccctcacctgacccacgtggttctagtagagttgttacccgacccccgggcctggacgatcacacggccgtgtcccctggcccaggggagcaagccctttcctggaatgaggaaggaccctgcactcctactcggtagccacactggaagcgagccgacctggccctgtctgagccatgcccccattctcctcccctattccccttgaagaatagggaaacacgtgtttgcagtggagaagcagaggccaacacacacagggagaaagagcaagggacagaaacacagagacaagtggaaagacagacagaaccctgacgacagctgggtcctcggaggctcagaggcccagaggcccagaggcccacgccgcccaggcctttccggccatagcttccttttgtgctgacggcgtttgagctgattccttcagttagaatcctaagggtcttggtgctctcagcccctgccctgcacagagtagcgatggatccactgcccctggtgacagtgtgtgctctgagtgtctctgggttcccggggccccacaaacactgtggtggcaggtgggaacgactgaggcctgacgaagggggacgggagtcctcccccccgagtacccacaagtacccaacacaaagacctcctcaaaagactggactggacactcctccatcagcagggtctacctcactgatccagtatgaatgacggcccagccactcagccagggaggtgagcagggccagtagcagcacaaaacccacattccgtcctgttccatacgtgtgtgagtgaatgcagcccttgtgcatgcatagaaaacgctctgggtcgggtgcagtggttcatacccataatcccaacactttgggaggccaaggtgggaggatcacacccaactctggtgctggggaggatgctatccttgggcccaaatggggctgagggcaggatagagggcagtggcaggtccagcctcttctctcctcggcctgggcttctgcgtgaggcagggggctgccagtgttgagggcacacctggccatccagagcgtggccaccctgtggtgggtccctgctgtgcctgctgtgctccaggaagatgggaaggggtctgtggccacacctgtgtgctgcttaaggtggtgacgtcacagcctttttcatccagggacccggaaagaaggagtgtctcggggaagacagcagtgggggcctcatggtctggagccctctccccaccagatagatggaagttctggaatgttcctagccggttctgcttctcttggcctgcctcttgctgtgggccctcaggcaggccactggccttcctgagacctgatttccttgtccatgaaaatgacatggaaggtgacagcagcaggatggctcatgggagacgtggctgagcactgggcctgctggcgcctcttctccagcatcagctcttcctttccagttaccgggggtgggggggaactatattgcccagtacctgtccccgctttttcctcagtaacagagccccaactcgtaactgggcacctggccattaagagtgaaaattacatttcccagcgtgccttgcaactagatgcagccatgtgtctgagttctgggcaacgagggtgaacagcaatgtcacgtgcagcagaaagtatccttaaacataaggctgtgctcttccttcctgctagttggaatgtaggtgtgatggctggatcctaagcagctattttggatcatgagaaagaagccacagtgaaggatggcagagcaacaagctagaggagccagggttcctgatgatcctagaggcatcagagtggccctggaggccttaagtaaaagaataagaaacatcccccttccttaagtcactacgacttctgtgctgtttctgtgaagcctgaatctaatcctgatgtctatgttggttacccatcagtctaccctcagtctctttggctcttctctgtgaccagccctgctggcccacacccaacatccactctccacttctccctgctctcgttctgctgggaccccccctttgagggtcccactctccacttcttctcccccccgccgttctgctgggacccccctttgagactcccagggccctgtggtctctgaggttgaggtctactctcagcttgatgttgctgccaagccagcccctctcacagcacagagcgctcagcacagcctgtaattatgtatttattgtgggtttatttgattgctgcctccccaggactgtcactaatgtgagggcagggcccctgcctggtattcacatgatatcctcagctcccggctgggggtctgggctcaagcaggtacccagtgaaccctgggcaggtgaacctcgtcctggtgagtgctgactccgtgacccaccaccctccccaccccttcctcggctaccccggccccagccactcctgtccctctctctaccctcccccaatgcccagagtccccctcccagcccttttcttccaccccattgtcttctctgcccccttcctgaccttgcattgaggctgcaggcctcggggccttccagtgacccacacccagccacgtttcattttctgaacttgggtttcaaacatgaggaaggaactgaggctggtgttccaggagcggccccagcgcttgctggtggctgtgtgggggcacaggccccccagtaagtctcccatccacaggggcatcagaaggatggagaggtagagtgtctcccccaccccccgattggcctataggaaaggacagacagtccccagtgctggcaccatgtggggcaatcagaacccacccacactgcgggtgggagcagcggtcaggacagtggcttgcagagctagcagtgtctgctaacatccaccagaaacccccactgtcgggcacaaggagacacacactagaatgtttgtagcaacactattcacagactttggagataatctaaatgtctgtcaacaagagacttggtagataaagtgttacatccatacaatggactacaacacagcaacgcaagagaacaaccacagacacacgcaggacgcagcaatgcagtgagcacgggcagcattgtgtggcgtgaaggcgccagcctcggagaggacggctgtacagctctgctggcgcggactaaggatcaggcagagcagtctccgggatgggtggcagagcgctcctgggcttgcatgggagggggcacgagggagcctctaagggctgggagttctctggaccgggctggcggttgcacggatgtgcacgaatgtgaaagtccagtgatctgcagcttaagattggtgcacctggccaggcgcggtggctcacgcctgtaatcccagcactttgggaggccgaggcaggcagatcacgaggtcaggagatccagaccatcctggctaacacagtgaaaccccatctctactaaaaatacaaaaaaagattagctgggcgcggtggcgggtgcctgtggtcccagctactcgggaggctgaggcgggagaatagggtgaacccgggaggcagagcttgcagtgagccgagattgtgccactgcactctagcctgggcgacagagcaaaactctgtctcaaaaaaaaaaaagattggtgcacctacttcactttttttttatttttttatttttttggaaacagagtctcactctgttgcccaggctggagtgcagtggcacgatctcggctcactgcaagctctgccttccgggttcacgccattctcccgcctcagcctcccgagtagctgggactacaggcacccgccaccacgcccggctaatcttttgtatttttaatagagatggggtttcaccgtgttagacaggatggtctggatctcctgacctcgtgatccacctgcctcagcctcccaaagtgctgggattacaggcgtgagccaccgcgcccggccttttattttattttttgagacggactccctctattccccagggtggaatgcagtggcgcagtcacggcttactgcagcttcttcctccttgggctcaagcagtccgcccaccttggcctcccaaagtgttgggattacaggcatgatccaccacccccagcccggatcccagtttttgatgtcggtggaattggagatggcaggcagggccatctgtgtgccagctgtggttgattagcaggggctgcctggagaatgatctgagggcccgaggccaccgctgggctccgtgggagagagtggctgatggattagtgatgtctgccacatgcgctgcaggaacgagaggcagcctccatgtccctgaaagacggccatcctcgcactaacctcacagccccccacaggcagctcactccagccaagcccaccaccacctcctcaactgcaacaaatgcttataatgacagctcatgtatatttatcgagcctgtaattaccaagacagtgtgctgcacgtcacctacatcccctcaccctgcccaacaaccctatcatcatcgccataccacaggcggagaagccagggacaggggtgcctcgccccagcctcctgatgcctgcggcagaggcccagctgtgcacagccacactcccccggatgccacgtccctgatccccatggtggcacctccttgccccctgcttttcttcagcttctccaccactcctactcctccttgcccttcaaagccacctcaagtgccaccccctctctcctcattatccaagagtcctccccctcctgagcctctcaggggacctgggcccgagccaccttatcaggaacttgtgcatggctgcagtgttgggtcacacatgtctccaagtctgaactacatcctttcttccttgggctcctggggctaagcccaacctggcagacaaaggctcccctgagaaggtttgatgagtgaatacatgtcccctgcctcagagggaagcccccatctcaggcctcacacgggcagattcatcctccttccagatacaggccccatgaaggggcaacagcaaacaggatcagtccctgccctggggaattacagtcccagcagtggcttgtgacagctgccaagatgggcaagcattggagcatccaggaggacccccaggaagagggcctgaacaacaccgtgcacgtgcgctgacacggggcattcctcgtcctcagtcctgcctcgttttgtgactcatcactttcaggatgggaaaccctccaaggaaggtccccttggctctggggtggctcctagtggatctgcaagaggcggggcccagcctggtcgtgccccatcttaggctgcctctgcatgggctacacatccacaaaacaaagcaaaacagcaacattttctacgatgcttttattcacacttcaaaacaggtgctggacatcttcccattgccccatgccagcccctgctctgtgccccgggaagctgactgtaggtacaggatccatggggcctcgttgctccctggcctccacctagttcagccaatgcgtagccggtagacaagccaagcggtcaggaggggtgaggtcagtgtacagcagcagctcctccctgccgggtcgctgtgtccctctccaaggtcagggctcctggagacggcctctcctgtggctccagctgccctccaggtctcagggggtaacagctcccctttgttgctggccctgggtactgcacagctctcctttaattcacgtattttccatttattcaattctcctcaaataccctgtctgagggtgccataaaaatgtaagactgtgtcaattgcccatatcaaaaaacatgcttgtacgttccacttgaagtagtttggaggggagactaatggaaactagggggaggctagcccccaagcctccgctgaggccaccgctgtctgtgtcccgagggccctggagtaggaggtgtcaatgacggactcaatgaatgaatgaattgatcccaccaccaccagcggcaggcccgcctcttccttccacagcccaccttggcctccccgcctcgccaggtggcaaggccttcgctcctggtccctgagcgccgctcgcttccctcccgcgtgggcagggggcagccgcgacgccggcccagcgcctccgagccgggaaccgcacagcacccggcgatggccccgagccccgcgcgcccgaagccacggcgccgctcgctgggggcctcgggacggcagggacggctgggggtggcgcggaccgcgtccccgaggcgcgtagcgcgcgatcgaaccacgcgccccgcccgctgcggtcctctaacagcccctcgcgccgccccacgtggggccgcacgggctggcggccccctcacccgattggccgccgcacagccaatcagagagcggaggcgatagcggccgcgccgattggctgcggcgggccggcccgggggagggggcgggaccccttttgttctctccgcacctccgggttcgcgcgactgtgagcgcccccgccccggagcaggggtccgcgctgggggtccggagggcgggggcgcggcccgacgccccacccccagcttgttcactgccgccagggcccagcgcctgaagcgcgggtccttcgctgggacgagcgctttcatctccgtccctcagtttccctccccttgtcttctccctgtgtcctgggagttatggggaagctcagcccttggcaaatgagcttgggaccttcctaaaacctaagccaatgataggcccgatcttgcctgagaggggcacgtgagagacccccaagctggagaggcagatgtcctggtaactctaacctgagaccgttttcagggtgagccttctcctaatcacggctggggcgtcttcgtccaaggtggggctggatgggggtgggcagaggcccccacagtcacagcctggccagctgtgcaaatgctcccctaaaccgtcccccgcttcagtcactcagccaaccaatcaatcgcaggggcctccctctggggtggaaagtggtggccccagggaccagggaccttcacagggagagagggctgtggtccgggcaggggcgtcaggggttcagcctgggtctcctgacctccaggcccacgtcttcccttagacaacacctgagagcatctcccagcgtggctgtggccacacacatccctgggagtaggacgggccaccgcgctgaagctgtggatgcagggctcccaatctgtaggcgaggggcctctcccctgcaggggacaggatcaggaccctgggagccctcagtccccctcccagcactgattacctggaaaaccccccgagcccaggttgatgaagaaggtgggaccctgacagtgagtggcctgagcctgggatggtagcttgacctcatctccaaggtcatcctcccagacctgggagtctaaaaacattaaatccttcagaaggacatatttgcatcagatcactgttcagaacgccactggtgccattcacggagcagtccctgggctgaagtggctgctctggtctggtgagcgggggcacccacgcgagctcccaggcccagaggcctcccccagatcctggtgttagtggcccatggaaggactcccagccccagaggcttggcaggtgtctgcggctccccaggggtggggtgctgggaggctgacatctgtggagtgtttttactgttgaacaaattgaatcaattaaacaggccccatcggggtggctgggagcggtgaacaggaggaaagaggggagcggagccaagaggacagcctgagggcgtctgtctccccaggcggggttcagacgcacctctttccctgaatgttccagggcaggagaccccccgtgttgacaagagggaggtgagttagtggagggggagtgggaggaaagtcagtggggactgtccctgttgtgtgtcccctgaaagcacgccaaggcctgtgtctcctacccagccacctctgggcttctcagcccccagccctgtgatgaccctttggacatcccagcctcctttcaaagacattttattgctctcacaaggaggcctccggaagctgggaggctccagcagagaaagagaggaggctgcctagggaggctggaggaggcagagaggaaagaggaaacattgtgggggtaatagcaagggccccgggtcacccacctggagcggaagcctccccctcgggcaggctgagaatgacgcaggcgccggctgctctgtgacccagctgaccgagggacagcccctgcctgggagctccagcagctgctgcagcgtccctcctgcccaagcaagggccgcagggccacccctccaatccgtccccagaggtccactgccgctgcctctcctccagctgccgctcaggggagcgaggtttcttgagtcaggccaccggcagcgggcggccagcccctctcagcatggcgcttgcccagggcctgggctccgtcacatgccaggacagtggtcaccgtcaccctggacagaccacctctgtccctttatgtcaagtgaccattattgggccccctgaggcagacgagcgtctcaccagtaagctcccagggaggacggcgtggtcaggacctgcccatccgccagcactctggcctctaggcccgcaggctgagggcaccggcgggcaccagaacaggggctggtttggccgagggacctgcttcttgggcagcaccaggaaacagccggagaccctcccagcgcccacatccatggcgtgagccccgcgtgggtgcagccccttccgcagcccgaattccaggccagccgctgcaggagggaccgccagccaggggcgcagggcagagggtgggggaaggcgtggcgctcgcgctctcggctcttgcttggatggcgccggctgaggacccccacacctgcgctgcggtgcagaggtcttaggatccgagggggctgccggtctgggccggcgcgttcaggccccgggcggtggggcggcctcggcgtgcgtggctcggttgcctgcaggcaggcacgcggcgctgtgagaaacgaacgtccgtgacttagcccacgggaccgtttctgcattttcaccccaacctggagagctgcagcacagccgcgggacaggaagtcgccgccaggtgggtcaggactgcgacctgaactcggctctgcggcctcccgctccggccgccggttcgcaatcctggcgtgaaccagcagatcaacctccggcgcccgccacaggcgccctcccgcgggaaccggcaggcaggagcggtgcgggggcgccctccagcggccgtggccgggatggcggcctcctgccaggctccaagcgtggccgcgtgggcagcgcgcgcagcccgccacggaaagacaggcgctcctcctgggtgggccttgggaccccttcgcgccctgtgtggccgcctcgtggtgagcacccccgcccctccctgcaaggccggtgttcccagctggaagggcaggcaacctgggaaccagagggagctgctctggttgggaggaaaaagccagctcggttcccgcctgagccccgaaggggcggggctgggaagggggcctggccagagggaaggagcactctgggttgggggtgctgggggagcacaaaggcaggaactggggagcataaggccaggagataggggagaacctaggcaggagctgggggagcagccaggcaggaactggggagcatcgatgcaggagctgtgtcgcgtgttatccccgtcacgtggagttgtgtgtcctgcgaggagcacagcatttcagggcctagagcccctctctgtactggagccgcctgtgtgtgtccattccgaatgagccatacttccctcgcagctctcccagtgggattgagaactgttaggcacacacctggtgaagcattgctgccctttctgttggggagaagcggccttctagcgcagagaatagctgcttcctggaactgaaatcctgccgcatccagaccaagagcatgcttggagcaggcatcagtgcacacactgcttccgaaattacagctataaattttaaaaaaatttttttttcaaggcagggtcttgctctgtggcccaggctggagtgcatttgcaccaccatggctcatggcagactcaacctccctggctcaagccacgctcccacctcagcctcccaagtggctgggactacagacacatgccaccacacctggctaaatttttttttttttttttttgagacagagtctcactctgtcactcaggctggagtgcagtggcgcaaactctgctcacggcaagctccgcctcccgagttcacgccattctcctgtctcagcctcccgaatagatgggactacaggtgcccgccaccacgcccagctaattttcgtatttttagtagagatggggtttcaccgtgttggccaggatgatctcgatctcctgacctcatgatccacccgcctcggcctcccaaagtgctgggattacaggcgtgagccaccacgcccggcctagtttgggcaagttacattttttttttcttttttgaggctgagtcttgctctgttgcccaggctagagtgcagtggtgtgatcttggctcactgcaacctccacctctcgagttcaagggattctcctgcctcagcctcccaagtagctgggattacaggcacccactatcacacctggctaattttcttatatttttagtagagacagggtttcaccatgttggccaggctggtttcgaactcctgacctcaagtgatcggcccgcttcggcctcccaaagtgctgggattatgtgggcatgagccaccatgcctggcccataattttttaaactgtgatacattttgccattttaaccatttttaagtgtacacttcaaaggcattgagtacatttaccatgttgtgagactctcaacactatccgtctgcagaacttttttgtcattccagagactatccattaagcaccaacttccttttccctctctccccagcccctggccttgccctctccccccaacccctggcaacctcttacctactttctgtttctgtacttgcctattctagatgttttataagtggaatcagacagacgttgtcctttgtgactggctcatgtcacttagcataatgttttcaggccatctgtgcgtggtgtgcgtcagaatttccttcctttttaacgttaaatcatagtccattgtatggagggaccacatttgtttctctattcatttatggatggaaacgtgggttgtttccaccttttctctgtggtgagtatcgttgtggtcaacatttggaataactcgtgttgagcacactgttcgtgttcctgcccctagttctctgggtgtgtggctgcgcggaactgctgggtaattctacccttcgctctttgagaaccgctaatgtgtttttcacggcgcatgcattgtatgagagctccagtttctccacatcctcaccaacgcttactgtttttattattgttcttgttatacagctttcatttttataaaaagcaatttttttttttgagacggagtctcacactgtcacccaggctggagtgcagtggcacgatctcggctcactgcaatctccgcctcccaggtgaaagcgattctcctgcctcagcctcccaagtaactgggatcacaggcacccgcaaccacgcctggctaattttttgtatttttagtagaggtggggtttcaccgtgttagccagcatggtctcaatcccctgacctcgtgatccgctcacttcagactcctaaagtgctgggattacaggcgtgagccacagcccccggcccaaaagcagtattttcgtacaaacaatatactaacgctaactgaaataattaacaaattacagattaaaaaaaaatttttttttctttttttgagacagggtcactctgtcgcccaggctggagtgcagtggcaccatctcggctcactgcaacctctgtcttgcccaggctcaagtgattctcctgcttcagcctcccgagtagctgagattacaggcgtgcaccagcacgcccacccggctaattttttttttcttttttttttttgtaatttcagtagagacgaggtttcaccgtgttggccaggatggtctcgaactcctgcctggggtgctgggattacagccgtgagccactgtgcccagtcaaaatattttttatttacctccaaccccaccacctagagatgaccactgctcatttttgttgatggtatttggcaacaggcttgtctgctttctaagcactgttgttttgtttagagacagggtctccgctctgtggcccaggctagagcgcagcggtgcaatcacggctcactgtagcctccacctcccaagctcaagcgatcctcccgcctcggcctcccaagtggctgggaccacaggcgcgggccccctccagccaagcattgtttttctgacccgcaggatgggagcagggagagcgtggctggccgggggtccaccgggaggccctgcgaagggcaggccccggccaggcggggcgcggctccacgtctcagccggcgcttctgcgcacgggctcactactgggggcggccgggatcacggactcgctggcctcgtctccggagcggaggcgggcagcttgaaggagcgaccccgtgggccggcgcatccctccccaggccccgagacccggcgggagacggaccctccccatgcctcgccgcggaggcccgcgccgagccaggagccgcgcatccattggccgagagcgcggccgcccgggccaatcacagggcggccccggcgcccccgggcgcgccgtggggacagagtcaggcgcgtgcgcactcggccctccccggcggcctccaggcgggacgcggcgtcggcgcctgaagttggggctccgtcctgcctccctgcgggccgggaaaagggtctcgcacgtgcgccccccgcggtccgcgatccccagccgtcggcctagccccaggcgggtcgatcccgctgtccccagccccggaccagcctcctccagctgccgggtggagaggctggggggcttttcccgaggtcggcggcgaggctgagagccccggccccgccgcgcccgaggagacagcccttcgcgggctctaaaggccccggggcctccgggatgttccggggccgagttgtgcctgttgccgtttccggcgcccggggcctccgggatgttccggggccgagttgtgcctgttgccgtttccggcgccgctgccctcgggcaccgtcccctctggccctgccttggtctgggaggggtcgctaagggggcggagggcgctcctagggggccctgcggatctcctggcctcggcccccccgggtggccagagcggggctctgcacaaaggcctcaggtagccgcggcctcggttccgagaaagcccctcgcactgaccgggcctcagctgacccgggcagcctactgacccgaccctgacgcccgggccctccaggcctgtcagagcctccaggaaaggaaatgggctgcggggcgcagcgaggctggacagcgggcgctggcccaggactccccttgcccagaggagaaaatggaggctgagcctccggagagcccagctcgatgccaggagcactttgcagagggacacggatgggggctggcagcacttcacccctgtgcggtaacggagtaaccggagcgcactgaagtcagcagcacccccacccacccaccaaggccaccgccacctcccaccatcccgaccgtcctttgctccctcaacccttgttgctgtggggcttggggatatgttggattctcactggcccggaactttgctccccgagggccgcctggctgtagagcagaacccccaagtcctggagagaagggcagaggccggccgaccaggagctctgcagaggagcaaactctggcctgcggacccagggctctcaccggcatgtaaacctctgtggttcacgaggcttggcgcaccatgctctctgcaaactgggcctcataccacctgtctgccctgcacctggagaactgacagcctacccgcccagcactggcagcagaagctaaagcattcctggaacccacaggcccccagctagcctgaccccctgccccagccccccacggccctggcctggcctccctgcagctcccggaatgcacccaggctgtgctggccccagggcctctgcgtgcccatccctctgagggctgctcttcttcttgctctaggcgcctccatcttctcccacaaatctttgctcacgtgtcttctcagacagcccccacacccctgtctaaatgttcagtccccctcccccgctcctcggccccctcaagcccaattcttgcttgggttctggtagctggtgcccccttccctgctgctgcggacctgagctctttctgcccctctgtttcctgctgcatcctgcctggctcccaggaggcctctctcagcattttctgacaacaaagccggggctgcagatccctggtgagattccaggctagcatcagcactcctctcccgcacgcaccacagctaaagcacacaagggcaccgctgaacgccaccactcccagctgccagagtgccgcatccgtcggcaaggaaaatggggacccttccatagaaaacaggcaaagactgaacagacattcacaatggccccaaacaaatggaaagaagctcacgccctccaaaaaccaaagaaatgcaaattcacacagccaggaaatgtcatttctcaccttccaaactggcaaacgtggaccagggtggtcctgggtgttggtggggatgctggcaaggtgctctcagggagggagggcacagccctggggggccatctgagcctgtggggcacctgttcatgctaaggaatcaggagccacggccccctggggaccccattagcctcgctgtggccaggccaggagaagcccctcagtgtgaggacacaggagcactcagccccaggcagacccacaacctgttccagggccaggactgttccttcctgcccctagctccttccctgtctctctgtcccagtgcagttaatactggatgtttctgagtcaccagctggagggagtgtggcccttcagcctggtcaggggccccccagttggggtgggtggcttggctcatgacctcggtggaggggcccctgggcaccctgctggtggcaggaggaagccagagtggccccagaaacactccttgaagagccaataaatcacaagccccctctgcctaccccctccacatcgccgcctgacgttttttatattgatgcattaatttatccttaaaaataggcaacactgcttgtttgatttccacagaggccatgtggggcagagagtgacaaattatttcctgaccctcgagtagctgatgtaatgagtcccccacactgaaagcctgtgtgtccccggctcccagacactcctcagtttggcttggggccactccctggtactgggatgtcactagtgctgtccttgacaggtgacccatttgcctgaagcccgggatgcccatctgtctgggacctgtttcaggaccgcatgaccttgccccctgggtctctcttccatgccttagagggggctgggggccaggtgggggtgggggcactggcccttcctggggcctgacgaggctgtgacctcggctcatggggacagtttggatgctgctcattcgtttgcctacatcgccaggacaggcaggatctgggagcatcacaaaaaagggagttattcgcagcaaatatgagtgtgttcaaaaagaaatctgaagtcagtttccacgagaattctgtctactccggacaggcagaggccacctgagctcgggacctcccaagaagggattcagaggagccacattccactttctaggtgtgaccctcagtctgctccaagtggacttgagacatcccaataacaacactgactaggtactaaaacaaacacagacaggagcacgtgtgcaccccgaacacacagcagggcagcagccatccagggtgggcagcctcccagatggccccacaggcctgtacccctgccctcctgttggccacgccccaccaagggagggtctgtgtaatcagtagagcagggcagaggcgccagcaggccagtttagagggacacagcacacagcagcttccgtcctggttctctgtctctctgtgtctctctccctctttctctctctctctctgcctctctccctctctctctgcctctctccctctctccctgcctctctccctctctctctccctctctccctctccccctccctctctccctccctccctctccccctccctctctctccctctctccctctctctccctctctccttccctgcctctctccctccctccctctctccctctttccccctctccctctctccacctccactctctccctctctccctctttctgttcccctctccctctcactccctcttccccccctccccctccctctctcaccccctcctcctctccctctctctctttctgtctcccccctccctctccccctccccccttccctctctccctccctctctcgtctcccttcctctacatggggaggagctcactccctgccaacagccaggggaacaagcttggaagtggattttccagcccagcacgcagcctcgtggaagaccacccaggtgagttgcttccagcgcctcagctgctgtgagagatgatagatgcttgctgtaagcccctgtgttttggagtaatttgttacacagctgtagagggccaacgcactgctaaagcagcagcaggagcaggtgtagccaggcacctaagaggagctgcttataaatgccagggggtggctcagcctgtaatcccagcgctttggggccgaggatggagccgacctggacaacatagtgaaaccccgtctctacagaaaattaaaaaaataaaacattagccaggcatggatccgatgcttccgtaaggactttgaatctccaggcagggacagagaagacatcagagactcaggatcaacagcagctgcactgagagctgaggtcctcgcgctgggttgctccccctcccccactgagccactctgagtgcgggcgacgcttccctgggttccttctcgccttctgagaaggcttctgtcgacctgtggcttcagtgggacctgagctcatccccgagaccgccttttttcacttcgttaccgagggttgagcgtctgttactgagggtggtgcgcgcctgtagtctcagctattccagaggcttgatgcaggaggatcacttggacggtggagttccaggctgcagtgagctatgatcacaccactgcactccagcctgggcaacagagtaagaccctgtctcaaaaaaaaagaaaaaagaaaacaaaagcggggaggggccaggcgcggtggttcacacctgtaatcccaacactttgggaggcctaggggggcgaatcacgaggtcaagagattgagaccatcctggtcaacatggtgaaaccccctctactaaaaatacaaaaaattagccaggcttgaagagaatcacttgaagtcgggaggcggaggttgcagtaagctgagattgccccactgcactccagcctggggacagagagagacagtcaaaaaaaaaaaaaaaaaaaaaaaagtaaaacacaggggagaggagacctcagagttgcgtggctttccttttctgacccaggacagcaggggaagccccgcatttgtggccagagccctgggatagatggagcccaaacaccctcctctgcatgtctccattccctgggggctgcaggcccgagctgtctggtcctcccttcatccattgcacctggtgttccttctgcccagaaaattgttggtcctcccatgtatcagaagccacatgctcaccttccagggcacttctgcccacacaagcatttcctccaacatggaaggagggccatcccctgcagcaggcagtactccaggcttcagggagctgcccttcaccagaggggctgtctgcagacccacgcacacgcctggcatataccacggcacttagtaaatgtttgctgactcagggcatgcaggccaactctctggtctctgttatgaaccagaaagtgggggctgtggtggtaacaggacttatttacacaggttaacaacctgccaatgaggtaggaaccttccaccacactgattaagaaactgaggcacaaggaggttgtataactcgactcagattgcacaactattaagtggcagagccaggacacaatccaggtaggctggctctgcatctacactcaaccactgcacttgctgttttcctggaacaaaaccacctgcttgtcgggtgcctccctccatcagcgcctggaccaggacatcagccatgtgcatggtgggcctggagctgccccacgcccgccagccaaccaggtcagtgcggcctcccctccatcatgattggttcaggcaatccaggcctcagccaatcagaacaaagctctggtccagctcgcctggagcgcctgacttctgcactttcccagcatggcggcctggagatgtctcactcactgttgcccaggctggagtgcagtggggcaatctcagctcactgcaatctctgcgtcccgggttcaagcggttatcctgcttcagcctcccaagtagctgggattacagtaggtggctcacgcctgtaatcccaacgctttgggaggcctaggcgggcggatcacgaggtcaggagttcgagaccagcctggtcaatatggtgaaaccccgtctctactaaaaatacaaaacttagccgggcgtggtggcgtgtgcctgtaatcccagctacttgggaggctgaggcaggagaatcacctgaacccgggaggcagaggttgcagtgagccgagatcgtgccactgcactccagcctgggtgacagagcgagactccgtctcaaaaaatatatatataaataaaggagaagtgagaacctctgtttgccatagagcttcgtgcaaatacacgcattgatccgcagaggcaggcccacggggtatccaggtaagaacgtggtgctagtgaggaaaaaattcagatgcaagcagcagaatacccaactgcaggcggttcaatgtgtggaggcttttcttctttttcatgtaactagaaatctggaggtgggagttatccccatcgcgacccagactctttcagtctttctgctccaacatccttggcaggtgggcttttgtatgttgtttgtagggcagctgctggaattccatataccacacacacctctacagtcaaggcacaaagaaaggatggagagacagggccagtcacatctgtgcccttttagagggaaagacaaacctgccctagaagcccctgcagtggattccccccaggcctcaacggccacccatgatcgggcatgctatgagggattcagagacggcagagagccaggttgtcatgacagcaatggccaagcatgcttcattgccagggtcttggtagccctccaaaaagcaaagttccataggcaggaaagaaggggaacagattttggtgggcggcaggtctgcctgccacaggtgggaagacaagacatggggaggttcacagattacgcaggggagtggggatcagatgaagggctgcctggccgggtacaaaacctgagatcctgctgcacagctggatgagggaagagccctgctgctgctgctgctgctccagccccctcagcaacagcatggatgtcacagatgctagccaccagatgtccactagcctcactgccagaaccggttctatgctgctcctgcttatggtgtgaagacaccacaggcttccaactgaaggttggaggtggatgcacctgactggtggagcctgggccatgtgactgagtcctgacagcaagggatgctgggaaagttagtatctaccgtttttcaatttatacagaaagatgagtcctgctttgcaaactggagattaactttaggtgagaaggagattctttatacatgcagggagcataagctggcacaactttttggaaagtaatgtggcaatacatatgagcagcctaaaaaaggctatagcctgtcacccagtaatttcattttagataatctctcttaaaatcgtagtaggggctgccaggcaaggtggctcactcctgtaatcccagcacattgggagcctgaggcaggccgatcacctgaggttgggagttcgagaccagcctagccaccatggagaaaccctgtctctactaaaaaatacaaaattagccaggcatggtggcacatgctggtaatcccagctactcgggaggctgaggcaggagaatcgcttgaacctgggaggcggaggttgcagtgagccgagatggcaccattgcactgcagcctggggaaaaagagcgaaactccatctcaaaaaaaaaaaaaaaaaaaaaaagatggtggtaggggctaggcgtggtggacgcctgtaatcccagcattttgggaggccgaggccagcggatcacttgaacccaggtgttcaagaccagcctgggcaacagggtgaaaccccgtttctacaaaaagtgtaaaaattagccaggcagtgtggatcatgcctgcagtcccagctacttgggaggctgaggtgggaggatggcttcaaccctggaggccaaagctgcagtgagctatgattgcaccactgcactccagcctgggcaacacactgagacccccatctcttaaaaaaaaaaaaaaaaggtagtggctggagtggtgggaaccctttaacactcatgtcatcatgacagagttgattataacccaatcatgtggcagcaactgacttgtccaatgaggagagtaagtgaatctcagtccagccatcctacaatgaatatttaataacccggggaaaaaacttaagttctaatggcaaatggaaagattaggatatacctgtagttgtcttggcaaagtcttacaaggtattatttattgaaagcaacaagccagttgtgcaaacctgcctcatttgaaattacttggcaggaatgtttggaaaattcctcctatttaaaaaaacttccccttgaaaattaggaaaagccttaaaatgaaaatacctgggagaaacctaaagatggttggctgagagctttgaaaatgtggacattcccagacaagttcataatgatgccataaataagaatgcttgcagcccggctcaatggtttatgcctgtaatcccagcactttggaagactgatgtgggaggactgcttgagaccaagagttcgaggccagcctgggcaatatggtgagaccccatctctacaaaaaaattaaaaattcaccgagcatggtggctcacacctttagccccagctacatggggaggcttgagcccaggaggtcaaggctgcagtaagctatgatcatgccactgcactacagactgggtgacagagtgagaccctatctcaaaaagaaaaaaaaaaatggaggccgggcatagtggctcatgcctgtaatcccagcactttggaaggccaaggtgggcaaatcacttgagatcaagagttggagaccagcctggccaaaatggtgaaaccccatttctgctaaaaatacaataaaaattagccagttgtggtgccacatgcctgtaatcccagatactcaggaggctgaggcaggagaatcgcttgaagctgggaggcagctatgtcagtgagccaagatcgtgacactgcactccagcctgggcaacagagtgagactccatctcaaaaaaaagaaaagaaaaaaaaatgaaccatggacataaatgtaaaatgcaaaattataaaagttctagaacaaaacataggagaaaatctacatgaccttaaattaggtcatgagtttttttgtttgttttttgtttttgttttttttttgagatggagtctcaatctgtgtcccaggctggagtgcaatggcatgatctcagctcactgaaaccaccgcctcctgggttcaagcaattctcctgcctcagcctcccaagtagctagtatcacaggcgctcatcaccatactcggctaatttttgtatttttagtggagacggggtttcaccgtgttggccaggctggtcttgaactcctgacctcaagtgatctacccatctcggcctcccaaagtgctgggattacaggcatgagccactgcacctgaccaggtcgtgagtttttacatacagcaccaaaatcattatctattaaagaaaaaactgaattgatattattaaaatttaaaacttgggctgggcacagtggctcacatctgtattcccagcactttgggaggccgaggcgggtggatcgcttgaggtcaagagtttgagaccagcctggccaatatggtgaaacccaatctctaattttaaaaaacacaaaaagtagccgggcgtgatggtgcacacctgtagtcccagctacttgggaggttgaggcaggagaattgcttgaacccaggaggcggaggttgcagtgagccgagatcatgccacttgcactccagcctggctgacaagtgaaactccatctcaaaaaaaaaaaaaaaaaagagcacggaaattcaaattccaacacactctgcaccacaggtccgccttgaggactgtgcgttaagtgaaataggccagtcacaaaagacaaatcctgtacagttccacatgtaggagggacctagagcagctaaattcatacagacagaaagtgaaatggtggctgccgggggctgggtggaggagaaggagttgtttgatgggtacagctttttggttttgcaagatgaaagttctggagattttggctgaacaacagtgcagatgctcagtgcccaactgtatgctcaaaagtggatggctgggagcgggggctcactcctgcagtcccagcactttgggaggcggaagtgggcagatcagctgaggtcaggagttcgagaccagcctggccaacatagtgaaacactgtctctactaaaagtacaaaattagccgggcgtggtggtgtgtgcctgtaatcccagctacttgggaggctgaggcaggagaatcgcttgaacccgagaggtggaggttgcggttagccgagatcatgccactgcaccccagcctgggcgacagagcgagattccgtcaaaaaaaaaaaaaaaaaaaaagaaccgggtatggtggcatgtgcctgtagttccagctattcaggaggctgaggtgggaggatcacttgagcttgggaggttgaggctgcagtgagctgtgatcttgccactgcactccaggctgggcgacagagcaagatcctgtctcaaaatttgaaacaacttcaaagaaggaaaggaagctatgcctgttgcatacaagcagaatcttcctcgcggctcggcctgctccagcctcccggaggatgagcctctgaccagggccggcccaggtgccacagtcacagccagtggcccgcagttctgaggcccctggcaccgctgaggcgtccctggagcttcctcaccagcctcacgcatcctgccggggtggcggggtcagggcccacctctgggcacgggaggcgtgggcctcacgggccacggatgggagcccagggcagggggctggagccctcgggggtcagagcccgtgcgccttccagggcggaggcggtcagccgatggaccaggcggtgccgcagcgacagagggggttgagatcggggctttcccctgcgaccagctcgcagcctgacgtcggcctcgctctggggaaaccaaggcacgggcacgcgcgggcgtggcgccaacgtcctcgctgccggccccgcctcgcccgggacagcgccccggccctgctccccgctctacggccccgcgccccggccatctgcggctcctcttgcttcgcgcccgcgccgcgctctgcccacgcccagccccgcagcttctctgtgacccccgcctgccgcaccccggctaggggcttattagcgccacggagctgagctggacgtgtccaggatctggggagggagcagcccagagagggcagggcctggccaggcctccccaggcagccctgcggtcctgcagccacgaggggaggggacgccacaaatccgggtgccgacccgggccaggagagtcgggaaatgggccttggctgggacccaggccgactctgatcccgcgggcctcgtagcccctccagccctcggccatgcaaagtgggggtcccacgggatgagccccagtgtgggagcccagctcggacagacatcacccctcagtcccccgaccctccgccccaggagagaagctggacgcttgcctgggcgaccaggtccaggccaccctaggcagtgaggagcagcagggggccatggcgagaggacagggagggcctctgttgggcctcggaggtggagaccccactgctgagccacagctggggcatgcattggctttcttctgagcatctgtctggggaaccgccgtgggaggagcagagcccctcgggcactggtagggaagccaggctgccaacagccctgccaccctggctgcaggttctggagccggggaccctctaggctgaagttctccaagtgggttgagcccaggtatccgtttatcctaggtaggcctccatgcctgaaggtcccgggctcctctggaccacccgtcctgccagggggcagacaggcctcctgtcccttcctgttctgttctgctccctaaactccaagctaagtgtgtccctgggcagctgggtcttaagagcctgaaaggctgcatggagtctgtttgttcgttcagaggaatctcagctatttcctgggaggctccatctgagcctggtaggtcccggatgaggggtgggtggcccggtgagcaggtcagcctgtcctcaggggcttgcagcacacccgccagggtggcaattatccaaaatatagaaaacaagtgccactgaggatgtgaagcaactggaactcttgtccactgccgatgggaatgcaagatgaggcagctgctgtggagaactgttggttcctcagaaaggtgcacagaatgaccctatgaccagcagtccacgccggccacagaccccagagaactgcaggcaggccctggaacacatacttcacaagcagaatgtagtatagacatatactgcagtatttctcagctttaaaaaggaagggccaggcacggtggctcacgcctgtaatcccaacccagagggtgaggcaggtggatcacttgaggtcaggagttggagaccagcctggccaacatggtgaaaccccggctcttctaaaaatacaaaaattatccagatgtggtggtgggcacctgtagtcccagctactcaggaggctgaggcaggagaatcacttgaatccgggaggcggaggtagcagtgagccgagatcgtgccactgcactccagccttggcaacagagtgacactccatctcaaaaaaaaaaaaaaaaaaaaaaaaaagagagacagaggttgcagtgagcctgagatcacgccactgcactccagcctggatgatggagaatctgtctcaaaaaaaaaaaaaaggaaggaaggtgtggtggctcacatctgtaatcccaacaccaacactttggaaggcagaggcagaaggactggttgagcccaagagttggagaccagcctgggcaacatggcaagaccccatctctataaaataaataaataaataaaattggccgggcgcagtggctcatgcctgtagtctcagcactttgggagtccaaggcaggcagattgcttgagttcaggagctcgagaccagcctgagtgatacggtgaaacctcgtctttcctaaaaataccaaaaaattagccgggcttggtggcatgcacctgtattcccagctactcaggaggccgaggtgggaagatcacctgagcccagccagtgactgagcttgcaccactgcacttcagcatgggcaacaaagtgagaccctgtctctaaaaaataaataaataaaagtaaataaattaaattagccaggcgtggtggcacacgcctgtggtcccagctactccagaggctgagatgggcagattgctggagtcagggaggttgaggctgtggtcaactgtgattatgccagttcactatggcttatgttacactgcaagaccctgtccaaaaaaagaaaaaaaaaaaaaaggaagaaaattgttgtttaatagatatagagtttcagtcggcatggtggctcacgcctgtaattccagtactttgggaggccgaggtgggaggattgcctgaggtcaggagtttgagaccagcctggccaacatggtgaaaccctgtctctactaaaaatacaaaaagtagccagatgtgttggtgcatgcctgtagtcccagctacttgggaggctgaggcaggagaatcccttgaacccgggaggcggaggttgcagtgagccgagatcgtgccactgcactgcagcctagtgacagagcaagactccgtctcaaaaaaataaaagaaaatagttgtagagtttcagtttgggaagatgaaagaattctgaacatgtggtaatagaggcacagctttgtgacgtaatgactgtacacttcaacaccattaaaatgatcaattttgtgttatgcatgttttaccataatctaaaacaaattttttggggggctgggcgtggtggctcacacctgtaatcctagcactttgggaggccaaggagggtggatcaactgaggtcacgagttcaagaccagcctggccaacatggtgaaaccccatctctactaaaaatataaaaattatctgggtgtggtggtggatgcctgtaatcccagccacttgggaggctgaggcaggagaatcgcttgaacccaggaggcagaggttgcagtgagctgagactgcactattgcattccagcctgggcaacagagcaaaaactctgtctcaaaaaaaaaaaaaaaaaaaaaagaaagaaatttttttttaatcctgcatatcggggagggagatggacgagtaacagagggtggaagtggaggaaggcgtgcttcccgggagaggactgggctgtgtggggatgctgtggacggctgcacaggtggtgcactgcacaactgcaggggatgccattcacatagaccatgatgctgcatcatgtgtgaagtatgcaccacggcagtcctctctggagggcaccctgagaagggccgccagcagggagctggacagcacggggacacatcctttccagcaggaaaggattccaaacgaccaccagcaggcgggcaggccaagcatagctgaagggagccatgggaggccacgaggtgctctgtgtacagcaggcagccccagcacttggcccacgtgctgcacagaggaaaacacctgcccacagctgtctctggctctgatgtttaggacccacctccaaccaagcaagggtcctgtaagtcagaaaatctctcagtcatcggagccaggatttgccaacgtgaaccactgaacttcccccttggtctccatcctctatgaaaacatgaaaggggtttgaaattgcatccaataaacacaatgtccatctcctgccggggaaaattggtctgggtagagggatgccggtggtgtggacaggctctgaaagctgcaggaaggctcggcttggagaacatcctccacctctgcctaccatcaggacccagggatcctggggaaggggagccctttcaggagtgccctgaagtcccccagcacgtgtgacacttctcagagcaggcatcccttccagaagtttctgttaactaagctgaatggcatttaagatattgaaaacaggctgggcgcggtggcttacacctgtaatcccagcactttgggaggccgaggcgggcggatcacgaggtcaggagatcgagaccatcctggctaacactgtgaaaccccgtctctagtaaaaatacaaaaaattagccaggcgtggtggcgggcgcctgtggtcccagctactcgggaggctgaggcaggagaatggtgtgaacccaggaggcggaacttgtagtgagccgagatcgcgcccctgcaccccagcctgggcgacagagcgagactccatctcaaaaagaaaaaaaaggaaggatagaattagaaaaccattaaccaggcgtgctggtcctagctactagggagactgaggtgggaggattgcttgagcccctgaggtcaaggctacagtgagcctctattgccactgcactccagccagggtgacagagcaagaccctggaaagaagaaaagaaagaaagaaaggaaagaggaaaggaagaaggaaagcaagcaagaaagaaagcaagcaagaaagaaagaggagaaagaaaagaaagagagaaaaaaggaaagaaagaaaaaagaaaaagaaagaagggagggagggagggaaagaaagaagggaaggaaggaaggaagggagaagaaagggagggagaaagggaaagaaaagaagaaaagaaaagaaaaggccaggtgcagtgcctcatgcctgtaatcccagcactttggaaggccaaggtgggcagatcacctgaggtcagaagttcaagaccagcctggccaaccaacatggtgaaaccctggctctacagaaaatacaaaaattagtggggcatggtggtgggcacctataatcccagctacttgggaagctgaggcaggagaatcgcttgaacccagaaggtggaggttacagtgagccgagatcacaccaccggactccagtctgggcaacaagagcaaaactccattaaaaaaaagaaagaaataggccaggcgcagtggctcacgcctgtaatcccagcactctgggaggccgagacaggcagatcacgaggtcaggagatcaagaccatcctggctaacacggtgaaatcccatctctactaaaaatacaaaaaaaaaattagccaggcgtggtggtgggcgcctatagtcccagctactcaggaggctgaggcaggagaattgctggaaactggaggcggaggccgcactccagcggcgagagagtgagactccatcaaaaaagaaagggagggagggaaggagggaaggagagaaggagggagggagggagaggaggagaggagaaaagagggaggggaggggagtggagggggagaataatttgtaaccactaatgaaatagcaggtcctggcagggatttccaatggctgctaatatcacaacatcaggctctgtgggactctttccctctccatgaagttgcacccaccctgtggtcatcttcttgctaaaaaaatcaacctgaatgagattaaacagaccagtttggacatttacacctagagctaactgactataggaaatataagggttgaggaacgtgccacatcaaccacaaggacgaaatcagcaaaatccagacaggtggaaccctttggaacaaaagacctgccttcttccacaaataacctgaaaggagaaaaatgaaagagggtaaatcccgcggttaaaagagatttaagagacatagtggccaagtgcaatgattggaaaccaaccgttaaaagaaatttaggtgggtcgcggtggctcacgcctgtaatcccagcactttggggggccgaggcgggtggatcacgaggtcaggagatcgagaccatcctggccaacacggtgaaaccccgtctctactaaaaatacaaaaaaaatacaaaaaaatacaaaaaaaataccccgtctctactaaaaatacaccagccgggcgtggtggtgggcgcctgtagtcccagctactcgggaggctgaggcaggagaatggcatgaacccaggaggcggagcttgcagcgagccgagatcacaccactgcactccagcccgggtgacagagtgagactccgtctcaaaaaaaaaaaagaaagaaatttaaggctgggcatggtggctcacacctgtaatcgccacattttaggaggctgaggtgagaggatctcttgagaccaggagcttgagaccagcctaagcaacatagggagaccccatctctacagaaagtttaaaaattatctgggcatggtggtgcacgcctgtagtcccagctactcaagcggctgaggtgggaggattgcttgagcctaggaagtcgaggctgcagtgagctgtgattgtgccactgcactctagcctgggcaacaaagcaagaccctgtccccccaaaaaaacagacaaacaaaacaacaacaaaaaatttaagacaaccaaggaaatttggacattagatgatactaagtatcgatcaataattggtgggtgggggcatgatactgtgatttttttttttttttttttttttttgagatagagtcttgctctgtcacccaggctggagtgcagtggctcaatctcggctcactgcaacctctgccatgtgggttcaagcaattctcctgcctcagcctctggaatagctgggattacaggcgcacgccaccatgcctggctaatttttgtatttttagtagagatgggtttcaccatgttggccaggctggtcttgaactcctgacctcgtgatccgcccgtctcggcttcccaaagtggtgggattacaggaatgagccaccgcgcccagcttgtggttgttttttcaaaaagagtcctaggctgggtgcagtggctcatgcctgtaatcccagcactttgggaggcctaagcaggaggaccattgagtccaggagttcagcctgggcaacatagtgagatgctgtctccaaaaaaaacacaaaagcaaacaaacaaaaggccatggaggaggccaatccccagctgtgctgagccaggatcagattctctcagcccctttcagcagcacctgtcctcctctgagtcaatatattgctgttgcagccgggcgcggtggctcatgcctgtaatcccagcactttgggaggccgaggtggacggatcacctgaggtcaggagtttgagaccagactgaccaacatggagaaaccccatctctaccgaaaatacaaaattagctgggcgcggtggcgcatgcctgtaatcccagctacttgggaggctgaggcaggagaatcgcttgaacccaggaggtggaggttgtggtgagctgagattgcgccattgcactccaattgggcaacaagagcgacactccatctcaaaaaagaaaaaaaaaagaaagaaaaagaaaaagaaatatggaacataaaagttaccattttaatcgtttaaaagtgtacaggccaggcgcagtggctcacacctgtgatcccagcactttgggaggccgaggcaggcagatcacctgaggtcaggggatcaagaccattccggccaacatggtgaaaccccgtctctactaaaaatacaaaaattaaccaggtacacaggcacacgcctgtagtcccagctactcgggaggctgaggcaggagaatcgcttgaacccaggggccagaggttgcagtgagccgagatcacaccactgcactccagcctggcaacagagcaagactctgtctcaaaaaaaagtgtacaattggctgggtgcggtggctcacgcctgtaatcccagcactttaggaggccaaggagggtggatcacctgaggtcaggagttcaagaccagcctggccaacgtatcgaaattctgtttgtattaaaaatacaaaaatcagctgggtgtggtggcacacacctataatcccagctacttgagaagctgaggcaagagaatcgcttgaacccaggaggcagatgctgcagtgagctgagattgcaccactgcactccagcctggatgacagagccaggatggtcttgttctcctgacctcgtgatctgccagcctcagcctcccaaagtgctgggattacaggtgtgagccactgctcccagcagtttttttttttgtttttttttttttgagacagggtcttgctctgtcatccaggctggagtgcagtggctcaatcacagctgactgcaacctcaatctccccaggttcaagtgatcctcccacctcacccttctgagtagctgggttactacaagcgtgtgccaccaggacaggctaattttttgtatcttttgttgtgggattttgccatgttgcccaggctggttttggactcctgggctcaagcgatctgcctgcctaaggctcccaaagtgttgggattacaggtgtgagccatcatgccctcactgtcactattttcctttttttttttttttattttttgtggccatcctactggatgtgaagtgatatctcactgttattttgatttgcacttccctaatgatcccctgatgatgttgagtatctttttcatctcccggttggccatgtgtatatctgcttgggagaaaataaagtcctttgctcatttttaaattgggttctttttgttgttgatttgtaggcgttctttacatattgtggatactagatccttatcagacataattttgtggggtttggggtttttttgtttgtttttgagatagggtctcactgtgtcacccagactagagtgcagtggctcaatcacagctcactgcagtctcaaacctcaaactcctatcaagagatcctttctcctcagcctcctgagtagctgggaccacaggcaggccaccaccatgctcagctaataaaaaaaaaattggggccaggcatgctggctcacacatgtaatcccagcaccttgggaggctgaggcgggcagatcacgaggtcaggagattgagaccatcctggctaacacggtgaaaccccgtctctactaaaaaatatgaaaagattagctaggtgtggtggtgggcacttgtagtaccagctgctggggaggctgaggcaggagaatggcatgaacccgggaggtggagcttgcagtgagctgagatcacaccactgcactccagcctaggtgacagagcaagaccccatgtcaaaaaaaaaaaaaaaaaaattggctgggtgcggtggctcacgtctgtaatcccagcactttgggaggccaaggcaagcaaatcacctgcggttgggagttcaagatcagcccgagcaacatggagaaaccccgcctctactaaaaatacaaaattagctaggtgtggtggcgcatgcctgtaatcccagctactcgggaggctgaggcaagacaatcgcttgaacccaggaggcggaggttgtggtgtgagccaagatcacaccattggactccagcttgggcaacagagggaaactgcgtttcaaaaaaaaaaatttgtagagacaaggtcttgccaagttgcccagggaacctgcactgggcagttccggaagagctgcagctttcaacgcttcgagagtgcgtgactgtccctggtccccatgccctggccagtgctcagaactacccatctcctgatttctgctcatctgatagccacaaactggcatctaatttgttttaatgtgcatttgctgatgcccagtgtccatgagcatctcacagtttgtcctgtaagtgcaatgcttcacaggacaaagagaatttctatcttttgcaggtatcagagtcgctgagaagagtcatgctgtgatgtgaggtcacagaacaaggtagggtgggagcctggagctcagtaagctctctgcaatttatgtttgcctccaccccgacccccaccaagcttgagcctcctctcccccatccccatatgggagggggagctaggaagcaccaccacctctgcttgagtaaaatctcttccaacagcagaacgatcccttgacccgacttaacatgaaatagttccaaatctcttttcaactggtagagatcttccttccctgtcccaacctccaaatgacttctgcagctgtaagcagttcagaggagctatgcattggactcccaatcccatctacagaggctctcccctggcacctgcggggagaaaagctgaagtacaaagggcactggctgagcctcttacaccaggtgaggccctcgttattggtagatactgagttccaggattcagtaactagccaactccatgactgctgcgctctttacacaaagtaaaactatctcatatcacacgtccacctgagggctggggggaaactaaggcaggcccctgctgattcaggtggttattttatgccaaatatttacccaagatgtcaagtcatctagtttttcctaaataatggaaaaagccgtctcaggacttccctcccagcctgcttatgatgttgcttcagttatctccaacacccaaacccactaggctgccttgttcttgcactttcgatttggaagaaatcgaactgctcagtttattgttaagccgttttctcaccagcccacgaagccaagctgagcagcacccaccgcccccacccccaagactacccaatacttccaggttggtctgtctttcccagcccacttgctacttccccaaacaggagccattcattggttacggcagcacttttatttttccttacacaatgacgtgttgctggggcctaatgttctcacataacagtagaaaaccaaaatttgttgtcatctcttcaaagaatcgagaattgcgtacaaaaaaaaccttacataaattaagaatgaatacatttacaggcgtaaatgcaaaccgcttccaactcaaagcaagtaacagcccacggtgttctggccaaagacatcagctaagaaaggaaactgggtcctacggcttggactttccaaccctgacagacccgcaagacaaaacaactggttcttgccagcctctagagaaatcccagaacactcagccctgacacgttaataccctgcacagatcagaggctgctggccacacagactcaccaagccacagacttgtcttccacaagcacgttcttaccttagccacgaagtgaccaagccacacgtactaaaggttgaactcaaagatatgtacagggtattaaacaaataccaaggggaacagttaacttcaatacaaggtcaaaatcagcaacaagttctacaatccagtgctgatatcagatacaagcttcaaggacaatttcttttcgaaggcttattccagtttcgtgaggctagcatgaggtgtgtgcatttgccaggggcaaatttctattctcaattaacccatgcagcaaatgctacgcatctgctgagtccgtttagaagcatttgcggtggacgatggaggggcccgactcgtcgtactcctgcttgctaatccacatctgctggaaggtggacagtgaggccaggatggagccaccgatccacaccgagtacttgcgctctgggggtgcgatgatctgcaaagacagccaggcacggcttcagctcacagagcgccccccagtcagctctcccgagccaggcagagggccaccaacccctcgactcaccttgatcttcatggtgctgggcgccagggcggtgatctccttctgcatcctgtcggcaatgcccgggtacatggtggtgccgcccgacagcaccgtgttggcgtacaggtctttgcggatgtccacgtcacacttcatgatggagttgaaggtggtctcgtggatgccgcaagattccatacctaggggacagagccctcccttagtgatgctgtgtcaccgaggatgtaagagtagaaacctttagctcacaacacctacccaggaaggaaggctggaacagcgcctccggacaccggaaccgctcattgccaatggtgatgacctggccatcgggcagctcgtagctcttctccagagaagaggaggatgcggcggtggccatctcctgctcgaagtccagggcgacgtagcacagcttctccttgatgtcgcgcacgatttcccgctcggccgtggtggtgaagctgtagcctcgctcagtgaggatcttcatgaggtagtcggtcaggtcccggccagccaggtccagacgcaggatggcgtgggggagggcgtagccctcgtagatgggcaccgtgtgggtgaccccgtctccagagtccatgacaatgccagtggtgcgcccagaggcgtagagggacagcacggcctggatggccacgtacatggccggggtgttgaaggtctcaaacataatctgagaagggacaaggggcggcttagtcagggacagagacccacggccaccccatgctcacacgccacaacatgctgcatgccagtgtgatgtgtggagaaaagaaaagaacgcaggcagaaaccaaatgagaaacctggaggcttcagggaggaaatgccgggagaggaacagagcctggaacagcgaaagaaacacttaaatgtcagaaatcaagccgggcagaaaatgactggggaaaggacgggaggagcacgggcgtcggccgagcctcacctgagtcatcttctctctgttggccttggggttcaggggggcctcggtcagcagcactgggtgctcctccggggccacgcgcagctcgttgtagaaggtgtggtgccagatcttctccatgtcgtcccagttggtgacgatgccatgctcaatggggtacttcagggtcaggatgccacgcttgctctgggcctcgtcgcccacgtaggagtccttctggcccatgcccaccatgacgccctgcaggggacgacccgtcagcctcgccggcgacaccgaacccaccccgcaacgcagaacccaggagccccgcggcgccatccactcacctggtgtctggggcgcccgacgatggaaggaaacacggctcggggagcgtcgtccccagcaaaaccagctttgcacatgccggagccattgtcaatgaccagcgcggcgatctcttcttccattgcgacctgcccggaaaaggatggactcaggcgggcgcgtctgtaacacggtcccctccccacagccacctaatgccctcccgcggggaagcctcggccctgccccaaccccagcggccgtggcctccaagatcgcaaccgcctggaaccgaaggccgggccttttacgtaacgtccacggctcggaagtctgcactgcggccgggccccgccctggacccccggcgcccccccagccccgtccgcctgacccggcccaccccgccttttgttcccggggaaggcgcgacgaggcctcggcagctggaagcggggccagccggggtcggggggcgcaggcctgcgacgtccagctcaggccccggggcggggcgctcaccggcagagaaacgcgacggcggagcggcggaagaacagagtgcgagagctggcagcggcgactgagaccgaccgcggcctcccccgccgttatttaagcggaagcggcgcgcccgcgcggcccggcggcgcgcgcggccccagaacatgtccatatatggcgatctttccgaaagccgggcacccattggcccgccgggcagggacacgtggggccccggcccgccccgcccccagcccgcaccgcctcccaacggccccgcccgcgccacccccgcgcgctcgcgaccctgcgcgggccggcgggcgggtctgagttggggcgccctccgagggtcgccgggagggccgaagggctgacgggcctggcccctccccgggactgccgcgccgtggggagggccctgctgcgccccgaaactgcctgacccggggcggggccgcgccggagctggggtgggtccccgagtccccggccacgctgcggggctttgctccctgggacgtcccttgcaatctttcccctcgggctccacgaggatctcgggcgccagtgccgggctgaggaaggggcgcggcgggggtccgcgacgctctgcgtccctgggcgcgggggagctctcaggagccctcacctcgccccggtcaccataggaaacagcccgcccgtccccaagcgcagccaccaccatgcaggtccctccacggggcgccctgccccggatctccgttcgtttgaagaccgaggcccctttctacccgacccgacacatccctgcccctcaaatcacaggcctgattgtccccaggcgcgcgctccgggttggggctaccccgcccccttatgtgctgagaaggtggtgtggagtgaggcctttgtttcattctggtcacctgtagacattatagggaaactgaggtagacaatgggagccctgacttttttgaaggtcggctccccagcttcgggcggtcggggggataccctcttctgtttacgatgctagttaagagcagcgatcagggctggcgtgggtttagccacaggcttgtccagggcgctcactcctcgccaggagcggcgccggtgctttggttacaccccgagaggcgcccggcactacggtttccttgtgcgctgctggaattttcagggttggagcgccggccgcgtaggggtggcagtgaggccgcgcagtgaggggacggactcgcccgaggtcgcagagcgttcagattgactcgacaggctggggggcggggccggggtccccacgcggagtccggggccctgcaacgttagctcgcgaccccgtgtttgggagtgacaacagcgagtcagggcaaggcggccggcccagctcacctgcgggctgcagtcagcccggacgccgagacccgtgcctaaggcccccgtgccccaggcctcccaggggtgctgagcgcccccaggcccagaatctccgggggcccgggcaaggctgtcaggtatgttccctcccgtggcgaagccggggctgggcctccaacagacccacccggactcgcgtccctgggcagaaccacacagcctgctcgacccccgggtgaggacttccacttggggggtcccaagatgcgacgtcacacaccgagggacacgaggcgggtggggaatagccacaagcccctccatcctgcgttcaccccacactacgttctgctccgggccggccggggaccctgcccctccgggtctctggtctcctccgaagcttctttgtctaggaagtgcggggaggtgccggccccgggcgcgcgtccccgtcccccacctttcttccccacgttgcggacccgaggccgccagggtcgtgggggcgggggcgaggctggcgcctcgagacccccgggttccccgccacccgcagggcctgagccgcggggaggggcggggaggggacgccgccgcgggccgggggtggagagcgacttcctcctccgcggccgcgtcacgcggcaggggtcaaggtgtggcccaggtacgcggcggggggcggtggcgcggccatatttggcgacttcggcgccgccggagccccgcccgcctccgccgggaagcccggcccggggcagcgccatccccgcccgccgccgggcctgagtcacggcgggcggggggcggaagtaacggacggggggcgcccgcccggcgctcctggccttatttagtcaaggaggccgccgattggcgcgcgggacagaggggcggcggccgggcagcctcggggcgtaggagtggcccggcgcctccgaggggtcggggcgggagccgggcgtggggggcctcggagcctggggagtcccgggaccgacggcggcggggatgcgggtctgcctgtccctgggatgcgggcgggcgggcagggcgaggcctggagcccgcggggcgcagggggctggaccgcgcgctgtgatttttctgtttagcagcggggcctcgcccaaggtcgcgcggggcctgtcctggatatgctctgggaagccagtggcgcagggcagccgccacccttctggaaccagtgccggagagggccgggcagctgggcctggggaggggaccgcatggatggagctgggggtagctgggcggcctccggagccgggagagtcggcagctgcacttccgccagaggtgggtgtgtccttcacatttcaggaagggagacttggggcctggagaagcgatgtgatttttcttttctagttcagtgctggttttgatggctttttatcatgaccttgttatgtcttattttagtttcggcccatttagtggatacgacaacagtggcccagggaggtatggcagagctgaggcttaacccagggcctgcgccctccacggcctgcactgccccacctccagctccttgccctgttcctccctctgcaccggatcagcccccggactctgggtcacctccacaccagttgacagggccccccagtccccaccgccaaccacctggccggctacttgtcagacagacatgggggcgtgggcatgggtccccacccctagcctttgcctctgtcactctacctgcctggaatgtctactttttctttatattttattttattgtatttttgagacagtctcattgtcgcccaggctggagcgcagtggcgcgatcttggctcgctgcaacctctgtctccggggttcaagcgattctcgggccttagcctcccgagtagctgagactacaggcgtgcaccaccatgcctggctaatttttgcatttttggtggagacagggtttcaccatgttggccaggctggcctgaactcctgaccttaagtgatccactcgcctaggccttccaaagtgctgggattacaggcgtgagccacctcacccagcctggagtgtctcatcttccaccactaaatgaaacgatggaccctgaacagaaaaaggaacagtggtggaagaactagcaaagcccacagccttgagtttggccgtaagtatcaaggttaatctctcagttatggcagttgtcccatgaccgtgtaagatgccaggttaggggacactgggaatagagcattgggaaaccttcccactgtctttgcaacttttctgtaagtttaaagttctcccataataaaaagctaacttgaatccaaggcaagcaaagcttccctactctcagcccacctccctcttctcccacacccttttggacagatgaaatgcaaggtgatggccctgtttcctgaagctctttccagggcctggctggctcccttgggcaggtctggagtgggctctgcctcttcaggaacagtggtcccaaggctggtcccggtgggcaaggctggtttcctgcaactcggcctggctgcctctgagttttggctcaagggacaaggccagggtcccacacttctgtctcctggctggtgcccagcttggggcttggttctcctgccccactgcgcagactgaagctcagaaggctcagctggctgccccccaccccacccctgcggagtcactgggcagctggctgtgagtggccaggtgctgcttgtttggtcccaggaccaggtctctgcatgtgttgtccaattctcacctggtccccagaccaggtctctgcatgttttgtccaattctcacctggtccccagaccaggtctctgcatgttttgtccaattctcaccactggaggagagtcccagactgtggagttttcacagggagggaaactgaggcagtctcctgggtcagggtaattagccagaaacaaggtcacattctgggaggtcagaaggttctggagggcggtgtgggcactctacacgagggttaggggcttgaatgcacacagacactcaggccgagagtccctcaaccccactcccctgccccgccccacccccgctgctccaggccttctggagacaggatccctgttgcagtttacctgaggctccccatccccgctgtgagcaggaaccaaggaggcccctggaagagccctgagctgggagtcggacacctgggttctgggcccggctcagccctgtgcctgccacgtgacctctctgtaccccagttcctgtcaaaaaagaggagagggctctgcgatgtgagatgtgtggcccatcaggggctctgaggctgcttgccctcccgtgtggacaggaagtctggggacaggaggccgtcaggtggcccagcaaaccccccaggcgtcttgcctgacacccaggggctcagttttcggtgatgagtaagacgtgctcagtgcctctgtgtgtcgtgtgtgagacctgagaccagggtgcctgctcctccctctgttcccaagggcatagccccaggcccgtttgtgaccctccactgggcccgagaagaaggctcctttccccaggcctcattcccctgtggcctcccagagccgcacggagtggggagggtctgctctccacctggccattgtggaccccaccccaggagctccggccgccccccccccctccagtcccactccttcctccccagaggcagcgaggcctgaagtttgtgtttcccctcagggtggttcttagctgcggtcacagattgcaggggaggagccagaaacggagatgaaaccgaggagcccccaccctcttcacagggctaaagccagaaaccaccgtcccaggccacagcctgcctcatgtggccatgcctgctccctggcagtgcgcgtcctgcaacccttcccaccccagggcctcggcttccgcaatgaatccccatgtttcaaatccccgctgctcccaaggctacctgctgcctcggggtagaatctaagccccttcccctggtgctggaggcccacagagtgggcgctgcctgtccctccactccttcagcgccctgaccaccgtctggctgttcctttgcccccaaagctgtcccactggctgcctcctcctggcatgcccccatgccacccacgacctcccatcaactcctattgattattagcttctttcacccactctctgccctagagcattggttcttggggcacagcatccttgtcctccacagtgaagctggtgcccctgtacctggcatagcccctgtacctggcatagcccctgtacctggcatagcacctgcccagcagctgctcgtgcaggaagcccaagtaggggtggaatagagagggaggagttcccagccctggaggagggagcgcagaggaaggctaggccgattcgcagctgcctcctatctcaaaaacgtggaaggggctataactctagggctgggagggaggggagtcgttttcgctgactctccgcacggaccctctcctgcccgctagctggtcagctcctccagctctccccgcggcagcaggccggggagcagatgtcttgtccagtgtgcgcggggcaccgaggtagggaaagcctgtttaacccgtcccgcccctcctgctctggccagcagctcgcccaagcagctctgcagagcgactaggtcagggcctctccaggtgtctccactcgagggacggctggcgccacgcggaaaaggggaagcgggtcagggcgggacaagggcaagaggttactgctctgggcgctgtgtcctaagggctgcctcttgtctgcggagaatggagggtgccgggggtcaagcccggactctgtcagggtacccgagtcttagccacgccatccttccccagcgcgccgcgggggcgggcacagcagggcgggcgtggctgggagaccggctgtgcctcgccgccccgcccgtcccaggccgggaagctgggacttgagctggtctgcattcgggcaaggtgagccccgggatgtttctcaggcagggcccagggctgcacgccctaacttggtgcggggtcgcggcggtccagcccggctgcacgtggtcgcgcgctccttgcagctcccagcccgccggcccgcgctcctgcgccccctccccacgcagtcgacctctcctgaccgccaggtgcacgcagggcgcgggcctgggcctcagctccgcgcactccccccgggacgcggcaccggggcttcgggtgggcccaggacccgcactcagcacgcacttcccccgccgagcactgtctggcagcggggacgcacccccaggaccacgagctcggaggcctggggccgggagatggcgcccgtggagtgggtcccgcgagaaggccgggaatggcgggccgctgtcgttcccacctgggccgccaggtgggtgccgctatcgccgcgaggccgcacctgtcgcgctgccggagcccgcgcctgcccaggagcgccaggagggacccccgctcctccctccgccactgggcggggccggtcgctgagtcacggccgcacaccggacggtgacagaggcagggctgcctggggaggggccggtgacctcagtcagggctgacgcggaaaagtgggatggggtcacccgtggcagtggatgagggggtggcccgggcctccactcactgcccacgctagatgtccggggtccctcctgcgaccgaggacaggaggcacccacagaggaccccaacacgaggaccctggccctgggtgcggggcgtttttcccgcactctgctcccctagcagatggcccctgctaagcaccagctcccagaaaaggaaaggaaggggctgagaggctggatcgaggcaacccagcaggaaaaggtggctccagggctggaggggtgggactcagagatctcactacatacacctgctggggacagaggcttctccggccttcccagggctgggccaggccgtggcaggggccgccccagacctgtgtcccaaggggccaggttgtttgcggctgggctggctccgggaaagtcagagggggcactgccggacaggggatgtccagtgccacaccagggcggtcacacttcctcctggggccgtggggacacaggaaggcctaggggaggggtggggggagaacacactcaggaggtgaccctgaaggtggagaggcccgagctggggtcacaccatgcccagggaaggatcatggttggcccaacccatgtgtccacttggtctgtgggagggaatcaccctggggagccccctatgcctggcccccacccacacacaccttgggctctcttgaaggttaactgtgcccagcaccttgacaagccccatttcctccagtccttaggacaaggcatcctttgggggcgtcaccaagctgggaaggtgagcccccgagtcagtgttgagtttgcgtatcggcaagtgccttgagctcacacccctggaactggcagtttggtgagagatggaatttcaagttgagaactggcctgggattttgaacgcttagtccctgtctcttgctggcactgctgctgatgagaaatgaatgtcactggattcctgatccagagtccaggtgttgtgtttctctaagagccttcaggcttttccttgctgatctaaaactgcttcatgtccctggtgatgcttttgcattcattatcttggctacttcctaggccctgttcttgctaatttgcttgtattatttcttttacaatttctttcttttgttttctgttcttctgttttgggatttctgttaattgggcattataccttctggatttattctctaatattctagtttttttcttctgtctacttttttaaaccttctgggatatttccttgacttctaacccttcagcggagtttttcattttatttattatagtttttaaccttttggttttgaaatttttttttctttttttgagacagagtttcactcttgttgcccaggctggagtgcaatggtgcgatcttggcccaccgcaacctctccctcccaggttcaagcgattctcctgcctcagcctccctagtagctgggattacaggcatgtgccaccacgcctggctaatttttgtatctttagtagagacagggtttctccatgttggtcaggctggtctcaaactcccgacctcaggtgatccacccgccttggcctcccagagtcctgggattacaggcataagccaagcccagcttttttttttttttttttgagacaaggtcttattctgtcatccaggttagagtgcattggtgccatctcagttcactgtaacctcgacctcccaggctcaagcaaacttcccacctcagccctctccatcccccagcagccaggactacaggtgtatgccaccatgcctggctaatgtttgtatttgtagtagaaatagggttttgccatgttacccaagctggtcttgaactcctgggttccagcagtccacccgacttggcctcccaaaatgctgggattacaaatgtgagccaccacacccagcctttgttttgaaatttcaaacttacctcgttttaaacatcttgacacatttgcttatcattctccttctatttctgagccctttggaagcaggtttcaggcatgatgcccttactattttagggtgtgtttcctaagaacaaggatgttttcttctataaccacagaacagtgatcaaaatcaggcaacatcagtatcacactgtttatccaattgacaggcaatgatggcgtggatcatacaacttcggtaatgacacttgtcccagaaatgtcctccgtagtgtgttttcctcatctaatccaaaatcacgttataacgttttgttgtcataaacttttttttttgaaacggagtctcactctgcactctgttgcccaggctggagtagagtggcacgatctcggctcactgcaacctccgtctcctgggttcaagcaattctcctgcctcagtctcctgagtagctgggattacaggcgtggaccaccacacccagctatttgttgtatttttagtagaaatgcagtttcaccatgttgggcaggctggtctcgaactcctgacctcgtgatccgcctgcctcggcctccaaaagtgcttgaattacagcccggccaaactatcatacttttaattcccaaggcctctcttgttctctgcaccatttcattaactataggcaatgagacttttttagaaagcagaccaacttgaatgcatggagctgagtggcgtggcgttgtccccaagggagctgggtgacaccacgatggtgaccatgtgcagagcccttctcaccgtagagtgataaatggtccgtttctgttttgtcccagaagtcagaggtagagttaattcctttcctttccccagcacggttcctggcacacctggcactccctaagtgcctgtgatggttggttcttacgtgactgaacttgcgggtggacgtggcattacacgtgggcagggcgtatgtacacctgtgtgtgtgtgtagatgcaggttcgcaggggctgggcagaggccgccacctgcagacctgtgggctcgttcacgccaggtgtccatgtctgtggtgtgcccctgtgtgtaagtccagctgggctgtagacagccatctcttctctgaaagttgatctgttcgtcactctaagccccaagcagccaggggctcatgggattttcatgaacactctcctcctgtcccctgcatgtgcaaaggtcctggggctcaggggttggaggctccatcgccccagtggttgtgaggcatctgggcttgtccagacaccttcgcttctgccctcggggtccctttggggacttttgtccttgctggggtccagagttttctggcaaggcctagagccctcttcctcccctccccttccaggcacagccccccaccagcaccttatgatttcacagaagacaaaagccagcagactgtgtgggctgtctgccctgagagttccaaggcgaggctccggagcagccagccgtgaaccccaactgcagttcgggaagctgctttcggggaggggcagggaggggagggggattctcggagcaggcaggcagccacgctggagagcccctccccaagctcttcattccaaccctgccctgccccctgccttgccgatggagcctgtcaccctaaacctggcctcagtaaaccaacccaggccagagaaagagaagtgcggccccctcgcccgtgtaagtggaactgcagcggagccgatagctcagccatgaaaaaatcatgaggtcgccaggctgcaggtctgtgctcaggaataacacccggggctgggcccctgggagtaggtgctgggccaggagtgaggacatcaaggcccggtgtgcccagcagggtggccctcacctggctgcagggccaaggggacaacagagcctaggcaggggcttggcacggggacaagggggagggtggagtacctgggaatcactggagacagggatgccaacaggagtggcagcggtcagggcctggcactgaggtgggggctcctccgatgcctgcagggagggctgcaggcactgctggcctgtgaaaggcgtggtcctcagccgcggggtggccccagggctccatttcccagttttcagggctccagtccagcagggcgaggagccacctctcccccagctgcacacacgcaggcctgtgccagctcacaccaccagcatcagcgttgcagggcatccagcctggagcacgtgccggtcaccatggcagcagacagcgtgccagcaggagcccaggctgggctcaagcatccaggatcagtggtctaggcatggggggcttggggtccttccccttggagcaccagacgggccaactcggggaggggaagggggaccctggagcaccaggacagcccgtccaccagcacctcagaaagggaacgatttcctaagggctctcgggaaacctgagggtggacaccaggtgccggtgggggcgcatggcttcctggtcctgcccagctggccccgcactgagagggatggaggccgaggctcaggcctcgggaggctgccaggggattctgatggctgaggcattccttgccctctgggctcaggtgaggccaggaagtctgtcacagctggctgctccctggaccagggggctgggggtactgctaccccaaacagcctctcactgcccaccgggacaaggcaccccctcccaggtgcagacctcagcttgggcctcaggcacacactgggcaggggcttccaccagcctcagaggtgggcgagggtggggcgtggagccctcagtgtggcagcgcctttgaatgtcgccacagtgcagcctgcacaggtcagggtggcaggcacgtgtgtatcccatgtgagtggttggttggcacctccggaggtgtggccacagggcttggtgagggtcagtgggaggggtgcttcctgttgcctgagaacactgcagggggctagagtgccccagcccaccatatgctcttgtgagttgtgtatgtctggagtatgagtgggaccctggaaatagcctcccttgggcagtgtacaacctgggctccctgctgggcagccctgagtaggctctcaggctgggatccaggatgacagtcccagggtccagagttggcccagcaggcgactcttctggcaacctttgcccaccctcatccatgagcaccttcacacacacacacacacacacacacaccacactcacacacatgcacaacgctgcacccatgggcagaggctcagcccatcatacaagaacccggccctgtgctggggtcccagctgctcaggaggccaaggtgggaggatcgccggagcccaggagttcggggctgccactggccaagatagcgccactgcagttcagcctgggtgacagagcaaaaccctgtctctaagataaataaaaagaaccagacggccaggcacggtggctcacgcctgtaatcccagcactttgggaggccgaggcaggtggatcacctgaggtcaggtgtttgagaccatgctggccaacatggtgaaacctcatctctactaaaaatacaaaaactagcggggcgtggtggtgggcgcctgtagtcccagctacttgggaggctgaggcaggagaatcgcctgaacctgggaggtggaggttgcagtgagctgagatcacgccactgcaccccagcctgggcgacagagcaagactctgtctcaaaaaaaaaaaaaaaggctgtgcctggtggttcacggctgtaatcccagcactttgagaggctgaggaggccagatcacaaggtcaggagttcgagaccagtctgaccaacataatgaagccccgtgtctactaaaaaatacaaaaaaaattagctgggtatggtggcaggcgcctgtaatcccagcaactcgggaggccgaggcaggagaatcacatgaacctgggaggcagaggttgcagtgagccaagattgtgccattgcactccagcctgggtgacagtgtgagactctgtctgaaaaaaataaaataattaataataaccagactcccgacatccaacaatctcaggcacttattaagtacctgctgtgtgccagaaattttgctgagaatccagaggaagcgatcctagcaggtggctgggcaacagcctggggtcctgaggtggaggcaggaggggctggaatccctgtaaacggcctccctccaaggaagcctggcccaggcgcccacccttcagtcaccctcccctgtttagctcacacagctgggtcagtgccaggcagccccacccaacgtggagctgtggggccctagaactgaggagccgccatcatttctggctctgccaccaagaggctgcccagagccaggcccacttagtgccgggcggccaggcttccccctgctgagcacccgatgcctaagcgccctgccagcccagacagcgctaatgaggccgtcgtgccaatcagaggggcaggccgcctgggctcctcctcagcctggctgggcgttggggtgtggaggtgaagccagtgtctgtgcctggggtgggggggaccatgggcacagctgcccctccggcttcccccaccgctcacggaccaaccgagctgtaccctcaaaatccaacgggaggccgggcgcagtggccacgcctatcatcccagcactttcagaggccgcggcgggcagatcacttgaggtcaggagttcgagaccagcctgggcaacatggtgaaaccccatctctactaaaaatacaaacattagccgggcacggtagcaagtgcctgtaatcccagctacttgggaggctgaggcaggaggactgcttgagctcgaaggttccagtgagccaagattgcgccactggactccagtttgggtgaggagcgagaccctatttcaagaaaaaagttttttaaaaagaagagccaatgggaaagtgaggtgcaggcagcaccctagcttgtatccctaaaccagagacagttccctggcatcggtgctaggcctgtgtcctcagtcccctggaaactgtgggagagtgtgtgtgggcatcgtctctgggaagggggtgaaaccccagactgcgtctccccaggatggtgcctggcacgtgacctggtttcgcacacagttggtgcctcataaatgcgtgtgaatcatagaggcggatgaggccagcacacagggagaggcgagagcaggccctggcgtcgtggcgtacgctgtgccctggggggtatttgcatgtgggagtctctctgcccccaccctggcccctgagcgtggggacagtggggacaggtctcctctttttcctcccctgtgtctgcaggtgcctggcacggttgctgtccagggcttagaggacagaggaagagcccctgagtctgtgcacactctgccaccatggccctgcccacctctggagcccacaggtgcccagcccaggccccttgcttttggctagactcctgccctacggggacccccatgatggccactcaggagatgggcccaggaggacaggggagtgactccaggccatgaccggaaggggcctgtggcccctgttcccagtccccagggagacgggagggtcacacgctgttatgaggaagaggacaccgggctggccctggcccagggtggccagctctggtttcactacttggccccaagcccctgaggcaggtgcaggagccaggcacggtgagcagggcccagtgcccctcaggctctggggaaggggtacagccaggtggcccagagcaaggaggtgctgtagacaggtgtgaccacttccagtctctcccggcctgctggccttcatcctctcccagattccaagggccaccgctgggagcatggggtggacatcgtcccaccagcctcctggatccacatccgtaaagactccaaagtgaagtgaggctggcttcactccagctcacagcagaggagggggcagcctcagggcccagcaacttgctcagagcgcacaggagtgcgctggggccgggccagcctggcccagggcctctgactctgccccctgcctgcagggctgcacggccactgtgttccaccctccagcgtgggtggcagtccagtgcgtcattctggggcctgagcagtgtggccagaggccggtctggggtggaggcgacctgggctgcaggttgtggctggggtccttgctatgcttctggcagcaggaatcagagaagcagtaactggatccagctgagggcctggcggccaccgagggtacgggcggcgatcaggttgcggccgagccgtgagcgttccactggacggcttctacatccggaagggctgggccgggccgggccgggagcccacacggggttggaggaggggggcaggaacgagagaggccaaaaggtgcagggccgtgaagaggggcgctgggcccacgctatgaggaaaaggggatcaaccctgccctccagccccgtaggccctcaggccctcgggctctgggctctgtgcaatccgggagtggctgaaatccaagctgagggtaatgaaaggtgctgctcctaagccgcacgtctctgatccgccctccccgcccgccctctgctgcccgcgggccctctaagagctgcccaggctgctgccgcgggtcagaggcgggtcagagcaggcagggggttcgtgacgccggctgggtctgggggctgtgggccagccgagccgacccgggcttctgggggaccgcgggggccgtgagcactcagagggcgcatcccaggcccctccggggacccggccagcctgaagatgccgacgaacggcctgcaccaggtgctgaagatccagtttggcctcgtcaacgacactgaccgctacctgacagctgagagcttcggcttcaaggtcaatgcctcggcacccagcctcaagaggaagcagacctgggtgctggaacccgacccaggacaaggcacggctgtgctgctccgcagcagccacctgggccgctacctgtcggcagaagaggacgggcgcgtggcctgtgaggcagagcagccgggccgtgactgccgcttcctggtcctgccgcagccagatgggcgctgggtgctgcggtccgagccgcacggccgcttcttcggaggcaccgaggaccagctgtcctgcttcgccacagccgtttccccggccgagctgtggaccgtgcacctggccatccacccgcaggcccacctgctgagcgtgagccggcggcgctacgtgcacctgtgcccgcgggaggacgagatggccgcagacggagacaagccctggggcgtggacgccctcctcaccctcatcttccggagccgacggtactgcctcaagtcctgtgacagccgctacctgcgcagcgacggccgtctggtctgggagcctgagccccgtgcctgctacacgctggagttcaaggcgggcaagctggccttcaaggactgcgacggccactacctggcacccgtggggcccgcaggcaccctcaaggccggccgaaacacgcgacctggcaaggatgagctctttgatctggaggagagtcacccacaggtggtgctggtggctgccaaccaccgctacgtctctgtgcggcaaggtagggagggcacaggtggcgacctcctgaggggtgctgggacccccctgcttcagggaggaggccgtgggggtctcacggggagtggtatcgtgtctgtgcgttcacatgtctgttctgggctgggggtccatgtgggacatgtgtggccactcagggtgtaggtgggtgggcctcgggccatgcccaggcgacccccactgaggggtggtggcttcagggtcagaggcaagggttcctggcctttctcagcatagctggagaatgtctcagccaagccctgggcagctgcggagtctgagactggagaggtgtgggccaggcgatgggcagtgcccagcaggggcaggaggcccacagcctggcctggtgccatgaggggcatgtgggcaggaggctgtggggggtccatatctccccttctttttctccaccccattttctggacttcatttatttatttattttttgagacagagtctcgctctgtcacccaggctggagcgcagtggcgtgatctcggctcactgcaagcgccgcctcacgggttcacgccattctcctgcctcagcctcccgagtagctgggactacaggcgcccgccaccacgcccggctaattttttgtattttttagaagagacggggtttcactgtgttagccaggatggtcttgatctcctgaccttgtgatctgtccacctcggcctcccaaagtgctgggattacaggcgtgagccaccgtgcccggctgcattttctggactttaaaggaaattggggaggagcccagggtagggcagggagctggggatcgggcggggatagcaccaccacgtgcctgaccagtggagcctcgtgtcctcaggagtgggggggcttaaggtcagctccagtgatggaggacacggtgggcaggcagctttacccggggcctgggctcctggtggggaggcacctccctgccccagtggggcgtggcctggctctccccagttcccaggtcaccagttgcctgtctgtgtgactccctccaccgcctatggggtgaaccccagcagttcctccttccccacaagctgagctctgagggaaaagccctggcccgggcagtcactacccacctgggctcctggctccatgcaccccagagtggctcggaggtggtctgaaaaggcgaggtggggagagccgggtgcatggagctcctcctcccaactcaggtccttccagaccagcatcagctgggcaaggagagctcccctgtctcctggcagctcccaggtgcccaccaagcccccaccctgacggatgtccaggccccctgggtacactgacactctggggccagatggcagaggccccaccctgtgcatggagaggggagcccagccatggctatggggtcctgcacctgcagttggcatcctcgggcctgtcccagcagtgacagggtcccaggagtgagaattcaactgtggatgcacggccatggcccttccttcctatcacagcccacagtccagctgtaatgcctgctggcctgggcccaggccgggcatgtggcaatccttaggtggttaaagggggtaagtgggacagtggcagtgagaatgcttcctccatggaagccaaagacactagacctttaggcatttgtatatggacagcttggaaagcagactcaaagtggcagtcatggccgtggccgtggcattgtggtgtgatgtgcatggtggcgtggaagtggaggtgaggacggtggtgacagtgtggtggcagcagcgacaatgatggtgatggtgatgatggtggtgatggtgatgatggtggtgatggtggtgatggtggtgatggtggtgatggtgataatggtgatggtggtgatgatggtgatggtgatgatggtggtgatggcggtggtgatggtgatggtggtgatggtgatggtggtggtggtgatgatggtggtggtggtgatggtggtggtgatgatggtgatggtgatgatggtggtggtgatggtggtgatggtgatgatggtgatggtgatggtggtggtgatagtgatgatggagatggtggtgatggtggtggtgatggtgatgatggtggtggtggtgatggtgatgatggtgatggtgatggtggtgatggtgatggtggtgatggcgatggtggtgatgatggtgatggcgatgatggtgatgatagtgatggtgatgatggtgatggtgatagtgatgataatggtgatgatggtgatggtggtggtgatggtggtggtggtgatgatagtgatggtgatgatgatggtgatgatgatggtgatgatggtgatggtgatgatgatagtgatggtggtgatggtgatggtgatgatggtgatgatagtgatggcgatgatggtgatgatagtgatggtgatgatggtgatgatgataatggtgatgatggtggtggtgatggtggtggtggtgatggtggtgatggtgatggtggtgatggcgatgatggtgatgatggtgatggcgatgatggtgatagtgatggtgatgatggtgatggtgatagtgatgataatggtgatgatgatggtgatggtgatagtgatgataatggtgatgatgatggtgatggtggtggtgatggtagtggtggtgatgatagtgatggtgatgatgatggtgatgatggtgatggtgatgatagtgatggtggtgatggtgatggtgatgatggtgatgatagtgatggcgatgatggtgatgatagtgatggtgatgatggtgatggtgatgatgatggtgatggtggtggtgatggtggtggtgatggtggtggtggtgatgatagtgatggtgatgatgataatggtgatgatggtgatggtgatgatgatgatgatagtgatggtggtgatggtgatggtggtgatgatgatgatagtgatggcgatgatggtgatgatagtgatggtgatgatgatgatagtgatggtggtgatggtgatggtgatgatagtgatggcgatgatggtgatgatagtgatggtgatgatggtgatggtgatgataatggtgatgatgatggtgatggtggtggtgatggtggtggtggtgatgatagtgatggtgatgatggtgatgataatggtgacgatggtgatgatgatgatagtgatggtggtgatggtgatggtggtgatggtgatggtggtgatgatagtgatggtgatggtgatgatggtgatggtgatgataatggtgatgatggtgatggtgatgatggtggtgatggtgatgatggaggcaatggtgatgatagtgatggtgatggcgatagtgatagtgatggtggtggtgatagtgatggtgatggtgatgatgacagtgatgatggtgatggtggtgatggaggggtgctgacagagtggtggagggatggggactgtatggaccatttttcagtctcttgatcctcaaccaccctgcatctgaccctatcatccctttgaggggagaatcccctactcaagaccagctcccatctcccactttagaagcaggaagcagcagccactcgcctccctgccttcaacagggctgagggtgaggacccaaccaccaggtgtttcaggctctggattggcggccagggctgtagggagcgggacatggcatctcagtcctggggcatggaacctcacggcttccaaggcagctgcagcgtgggtggtgccatagcatcacccctacccggcctctgtggagtggctacatggcaggcccttcatcgaggcatctccctggctgggcggcccctaaccctctcttcccccctgggaggggagtgagcacccaggcttgcatgtatccccccccatcggccagagcctgctcatttctgccaacagacagcatggcaggcagtgtctgatgctgccagtaacagaaaactggccacaggctggctcaagcagtgacactgatcatctcctgaaacgggagtccagagagccctgggcatggtgggttcccaggcagccactatcacccgctcagcagcttccccggagtcctccgttcttacctcctcaccgaaccactctcctgggtcagctctgacctcagcctgacgccctcacggtagtaatgtggctgctggtattccaggcctcacatccaggcaggacaaagtccagaggaaaaagaggcactggctctgcttgtgtcttcataggagtaagaaaacttctcccctaagtcctagcagacacttcttcacactcatttgccagaactgagtcccccaactgctcagctagcccctctggaggggggtaaaaccagtgttgcccagaccaaggcggactccactcctctcctattttgaggccatgtccccggaagcaggtggctgaatgagtagccccagacagcatcctgtctgaagggggtgtggggcaactctggggacaccaaagtgctggcctgggaggtgcagtggcggggggagccctgcgatgctgtggcttccttcagtgcccgcagggacggcgttcccacacctctcatgggcccctcctgcgggctcctgctgcccccgggtaccgtgtcagtgttgccctccactgggcccaggcagctgcttttagttcagtatttgccaggatctagagctggtggcagtggggatgctggcacgaatactcggtcacagtgcaggggacatgccgggtgctcctctgcgtctgatcagtgatgagtgtgagggagatcccagcctggggcgtgaggggcagctttggggctggcagaaggcaaaaggtcccaagctgtctggcatggtcacagcctggcatcctctcccctgggcacagcgtgggatgggatctggccccaccctcaggccctgtgggggctctgcccaccactccctcccagtccccagctggacaggccaccagagtccctgggccttgtgggaagctccgcaatctgacacaccactcccagtgtctggctgccatgcaaacagggaggtggtttgtgggaggagccagggacttagttcacagaagatcctgggtaggctctggtgcctgctgtccccatgctgggcatgggtgcccctccatcccctcgcaggaaccccagatggagcccggggcagtcttgtcctcccccaggggtcctgggagaccaagcacagatggttggggaaagctgcagaggtgacagggaccagcccctggctggagcccaggggtgccccatcaccatccgcaccatccccttcattaggtcctgcctgtgcccatccagcagcttagggtgagttataaatagaggctggggtaagccctgggtcaagagagcagggcaaggagattaccagctgattactgattagcagagagtgggggctgtgccaagcagaagggcctggctcctgggggtgtggagggaggtcagggctcccttggggacagtgtgcagggtccacagacggcacatatggccctggggcagggttcccagggtctctgagaggtgccttccaaatcttctcaagtcaagagggttctagatgagacccacctctggcttcaggggtgccccccaaaatatgccccctcccctgctccctacccaggagaggcgtgaggggcttccccatctcctccctccaggggtcaacgtctcagccaatcaggatgatgaactagaccacgagaccttcctgatgcaaattgaccaggagacaaagaagtgcaccttctattccagcactgggggctactggaccctggtcacccatgggggcattcacgccacagccacacaagtgtgagtgcacacatcccttcctcctccatcatccccatccccaccatcaccatccccatcatcaccatccccaccatccgcatccccatctccatccccaccacccccacccccaccagccccatccccatgaccaccatccccatctccaccatctccatcaccatcatcgccatccccatccccatcatcaccatccctatcaccaccatccccatcatcaccatccccaccatccgcatccccatctccatccccaccacccccaccaccaccagccccatccccatcaccaccatccccatctccaccatctccatcaccatcatcaccatccccatctccatcaccaccatccccatcaccatccccatctctatctctaccatgcccatcaccatcatcaccatccccatctccaccatccccattaccatctccaccatccccatctccatccccaccatccccatctccatccccatctctgccatccccaccatcaccatccccatctccatttacatccccatccccatccccctcaccatcctcatccccatccccctcaccatcctcatccccatctccaccatccccatctccatcaccatccccctctccatccccatccccatctccatcaccatccccctctccatccccatccccatctccatcttcaccatccccaccaccgttcccatcacctgcaccatcactcccaccaccatcactgcctcggccatgaggattgccgtagcagctcagtcagaaaggaaagcccactggggcagggtagcgcctgatggtggtgggtgtgtcagtggagggcaggcttctgtcccactccttggaacctgaggaggatggggaagtgagaccctgcacccccatctcctgctgtcctgaggagaccttttgctgctccctccagttctgccaacaccatgtttgagatggagtggcgtggccggcgggtagcactcaaagccagcaacgggcgctacgtgtgcatgaagaagaatgggcagctggcggctatcagcgattttgtcggtgagcactctgcctgccaggtactggggcaggggctgtctccacccagggaaaggacctgcccagacaccccatctccaccaagagctggaccctccccagcccacggaacgggtgctgtcatggagtcatacttgctagtcaagataactcgtcttggcaagggaaacaggtctgaatgtccttatctccgctgctgggaaccccctaggcgccttgccaaggccgcacatgaggcaatggcaggcctgggtccctaagtccaggtgtggcgtttcccagggcccccaccccgcccggcctggacagggaaggtggcgggaggggcagcgcagcagacgctctccccgccaggcaaggacgaagagttcaccctcaagctcatcaaccggcccatcctggtgctgcgcggcctggacggcttcgtctgccaccaccgcggctccaaccagctggacaccaaccgctccgtctacgacgtcttccacctgagcttcagcgacggcgcctaccggatccgaggtgcgtggcggggcgggtgggcacgcgggagcgggggtggcagcgggcaggtgggcacccccgccgacgccgtcccgtcccccaggccgcgacggagggttctggtacacgggcagccacggcagcgtgtgcagcgacggcgaacgcgccgaggacttcgtcttcgagttccgtgagcgcggccgcctggccatccgcgcccggagcggcaagtacctgcgcggcggcgcctcgggcctgctgcgggccgatgccgacgccccggccgggaccgcgctttgggagtactgaggccgcgcccagaccagcctgtcgcgcattaaaaccgtgtctctcccgcagctgtgggtgggccccggggcgccgcttgggggtcctgcagctggaggtggaggaggcccacaattctccccaaaccagagagagcccagaacttcccagtgcccagggactcccgtctgggaggtggtcttgtggatgggccgggtgacccaggccgctggaggggaggtctcaaggacatggggaggacggggactgggggtgggtgggggactgagcctgcgcgggttgaggccaccaacaccgaccacagatgacctcactggacaccgcccctccccaacctaggtcctcaaccctccctagcccccggcagcccctgcggtgctcgtccttccttgtgcactgctcaaggccaggcgagtggcagagggtgggggagagccagtcctggggaggtgggaccagcacggccagcaaggggaggaactggctgggatgcccctccactaagcccaccagccttagggacaaagaagggcaggtttccatggtaagaggctggaactccccgagccacgtgggcaaggcgggtccgagttaacccttggaggaccaggtgccacctggtccaagttggcagggaacggcagtgaccctggagctcgggctgtccctgcagcctgcagtgtcccctggtggcagccaaggtgaggtggagtctgtggctggggcgggactgggggcaccaggtggaaccgcagtggctggcactcagcacctccaggctccccgctcagcagagcctcggagagggtctgtctccctgcactgccctgcctgacgtgaacttggcctgccactgcgggaacccccacttccgtccacatccacagcctggggcacggcgggaggcagaggctaggaagcggagggtggggtgggaggtcaaagaaaccctttggaacggaataatggctgggcctggaagcggggggcccactgctgctgctgaggcaggtgctactccatgcagagacagctgccagcagctgccaggtggcgtctagcacatgctcctaggaggagggggaagaacagctgctctcaccccacgtgtgagctgggttgagggtcatgcaaggctacggtgtcaagccaggatcggagttggagcaggtggaggaagctggaaaggtcgagaggccgcccctgccaccggggaagggcctcacgtagtgagagctcaggtgctgagagcccaggaggtgtgcactgaagaggtgagggcagggaggcccaggatgggcgacagggcccggccacaccgtggtccgcaggctccccgagaagctgattgtggacctgccacctgcctctgaggccaagccctcctcaaatgccgagtgttgagagcaggttccttggaggtgcatgtgagttgggtacatttcgcccagtccctgtacactctggcggcacagcggggctggggactgcccactgtggtccctcctttcctgccgctgtagatctcctttttgttccacgtgacctgctctcttggcccctcagggtctgcgtcgcagctttcttttcggggggaccacatggcgtcttgaactaggcgtccccacagcaggatctcaggctggcaggtgggcatgaacatttgtaaacacaccagcactgatgcctccacatgggtggccctggagaatgccccaacagaggtcaggacagctggggacgccgtctcagccctggtggccagcaccgccttagttcaggaggctgcagtgccaaggacagcaagctatctaaacccccagtgtgtgcccgggggtgtggggacaccagtgcggctcatccctgtgtctgctctttcacaagccacagtggtgcccccacaccccctgcacagctgaggctgacagggttggatggtgccactgctctgcacagacagcagccccgtggaaggcccctcaggctcccagcctcctgagacctgctggcatccagctgagggtggggagatgagtcctgcaggcgacccagatctgtcagctctgggatccctgtggcctgtgatggcgagtgaggggctggcacagccctggacacacacccctcccccaggcgtgtgaacacagaccctgcacagtcctccgcccgctcatctagggccttcttgggagtccccacgggctggtctagcccctcactctccgagccctgatgctcagagcaagacacgggcacaagcgctgtacaaaggtcagagccagaagctcctgcccacgggtggcagaggacagccctggagcacagcagggatgggaccgttaaggggtgcaggcctgcctcggtgggtggctcgcttggccccagctctcccagcaagcacggggccatggccccattgaaaaggctgggtttggagtgtcaccacccactgaaaatgctgggtttggactgtctccacccgctgaagaggccgggtttggagtgtcatcagggcggccgtgctcccttagatgtggcaaccactgagggagacaaaccctgactaggagcaccccacaggcccctcccactccacagagaggaacgcaggggagagccaggcaggggccccaggcctcccagacacccccttgcagcagagccctcctcaggggtaactgggtcacagggacgcgtcttcctcagaggccaccccggtggtgagggctcccaagcagcgccagggctctggaaggagcccagtgagagagggtgggaaggggtgagagaaaacagccgaggcctgaaggttcacggacagacagggtcgtttgtcacagcagagaagcacctcacggctcctacccgcactcatcgcggacagtgcctgcagcgggagcggcgcgagcaccctccccagatgaaaacaccagcaccaggaggtgggccgtagcccaggctgagggaggaggctgggggctggggctcagggcccccccccgggccacagcgccaccctgagtggccctgaaaatagtgcacagtgctgggtactgccccggctggaggcacctagttgttgagcattccggccacaggccacccgctggcccttccttggtgtggcacgagaccacgggcacttgcaggagctccctgcatgctgttttgtgctttggtctcagggagcaccctcctacctcggggtcccagagtgggcagccgggcaggtgtgaacagtgtgacaagggtaccgtggggcacctggtagtgccacccagaggggcagccggtgctcctggtggtgtggcagcaacagttacaaactcaccccaagtccaaaccccagaaatcctgtttctctggccctccgggtccagaatgccctgcactgcctcctggcctcaggggctgctgcggtggtgggaaggctgcccagcagtgaggaaggcgagtgcaggggctgcggccgcggtcagagaaggagagacaccagcagaggacgcgaagctggaccggccaggttcagagcccgcctcggttgctcccaatcagaatctgctttgtgctccacggcctccaagcactttcatgagcgttctgctcctacgtggccaggtcctaccttccctgacggctctggccaggccagctcggtttccctctaacccatgaggcctgggggggctgtgacagaggctggaagcgtggccagagcccaggggcaggcccgcctggtcacagcaggatgaggctggggtggcgcagctgccggtacacctgtagcagcctctgggcggtggcacaggagctggcctcatcctccgtgcagagccggtcgcgcagggtctgcacctcccgcagcagtgtctgcaggtgaagcagacacagctcaggccccccacctggccctggggatgtcactgggtacctctgggggacccaccactcgcaggaccctacttgggaagtggcaggtggtccgaggaagaacactcatccggaaccttaaaacatgggacacgcagcctggcccggacacccagcccctcaagtaggatgaggggcaggaagagccatggccgctcggactttgccccaggcccatgggagcgaagcccatgcgctgtgaggactctgcggaccccgagtgactagaggggggcctggcgatgggcgctcctggctacccaggggaaggggactgcccggggaaccgggtgctcacctcgtggttggcgtggatctggcggaggtactgcacacggagatcaggagcgctggagccctgggtggcctgctctgtcaccatcgtctgggggacacaggagacatgctggagagggtgtgccccagcacctgcccccacaccccttggagcagggtgaccctctccctcgagctgcctggtgctgcctccctgcctggcacccctccccaccccagcgctttgctgttttccaccttgctgttcatctcgacttcctgccctccagagcggcagggcacagagcccctggcctgacagtttcttggaagcgaactcgtttggttcttttctctccatcgctgggatcttccctgtccccaagagccacactctgtgcagatccagacctgcctaccgcccccttctcccatcctgggcttcaggcctgaaggccgctcaggagaacagaccagccagggagctgcctcggcgtcttgtgcagagaccctggcctggccattcactcattcacgcagcccagcccagtgtgggctgcagcactggctccctgggcttggatctaaattcccagatgggaccaggtgtggctcagacctgtaatcccagcactttgggaggccgaggcaggcggataacttaaggtcaggagatcgagaccatcccggctaaaacggtgaaaccccgtctctactaaaaatacaaaaaattagccgggcgtagtggcgggcgcctgtagtcccagctacttgggaggctgaggcaggagaatggcgtgaacccaggaggcggagcttgcagtgagccgagatcccgccactgcactccagcctgggcgacagagtgagactccgtctcaaaaaaaaaaaaaaaaaaaaaaaaaaaaaaaaaaatatatatatatatatatatatatatatatatatgaaatcagccaggcgtggtgacagagcctgtaatcccagctattcgggaggctgagggagaattgcttgaacctgggaggcagagggtgcggtgagcagagatctcaccgctggactgcagcctgggtgacagagccagagctctatctcaaacaaacaaataaaactaaatttccagatgagcctgggcagtgaggctcctgcaggctcttggagcaaagcaactgtgaagagacgacaccctgaggggcagcactggcctgccgggggctccagaagtgctggtggctgcactgtgtgctgggcagggtcctgatcactcctgttcctggggcgggcacctagctgttgggggacactaaggtctgcagcctgagatgagatctgtgtccaggaggcagcagcagtgcatgggctcctgggcgctgactcaggccccccagattcatgcggaagccctagtgccagcactcagagcctggctgtgtctggaaatggggtatctgcagatgatcaagatgaggtcactggggtgggtctgaccccacacgactgtgtccttgtaagaaaagggatatctggacacaaacccaggggctggagctctgctcttggcaggggatgggactttcttggggaccagatggtccagtgggcagagtttcctctgacaggcaacacctcagctctggagaaccccctggtgcccccagcactcaggactagacccccaagcccaggcagccccatcgtggtgccgtgagatcactggggtcatggtgctgcgtgacatgctcatcagggtcatggcagtgtcacagtgcagggcacagggtccttgcaccaaatgagatctctgggtcatggtgctgcgtgagttgatgtgttcattggggtcggccatctgagccacctgccagggctgggcagagccactgttcacagaaaggcctggtctccaagcattaccacagtgcccacgggagtcaagctggcgtcaggctgcaggccctgggtctcagggttgggcaggcctgggcatgcacgttgataacaagcccaggtggagctgaggcagggaccacccctaaaaagaaactccggaaccggtttctagggtcgctgcagacccaccatatgggccaaagctgcgctacagtcctagcgggcgggcgtgacggatgccttcccgcgggcacgagcttagactttagcttggaacttggagagcttcttctcagatctggcagccgctgacccaagctggctctgggcacagcatggaagcagctattcctgtgccagggaactcctggggctgtgagtggggggaactgcaaactccactctcttggcaaagatgtggaggctcctaccacctcgttctaggatccacgcccaggccacggcctctccaggcagcctctgcccagccagagaagggaggaaaccttgggctgacctcgcaggtcacaaatagaaacccactggccttgtagcccgggcagtccttggactcacaggtgcccagggggtgacggcacacctggggagcagcattggcctcctgagagggtccaccccatgcctctcatcgcccacagctccactgcacaacaccgcactcagcggcagagcagacttggatcttcctacaactcccttgcagggagccgcagaccccgtggccagcagctacagggtcccatgcagggaccttagtgagcgacccacagatcctggccaccttccccagcgggccgacatacctgcatgcgcccgacaacggcatggtgcgccctgcaaatgtcggccagagaggagctttccacttgaatctccacggcctggatgggccctgctgggcacaggtcagtcatggccacctgcaacacaggagccacctcactgcctgcctgtggcactcccacctgcccggggggctcaggctacacaggagcctccccagctggcagcacgtgaggccctgagatggtcccaaccccctgccctgggctgtcctataccctgaaggagcagagctcagtaccctggtttagctttttccacctgaagaaccagccaccaaccaatggcaagaacctgctctgtacccaggtgtgtccaggaagacaccatccctcagacctgtggaattcacgcagggcctcgagccagactggggcctgctccagaagaaggccactactgtgacacaccttgtggacaacctacatgtagatcctgccacgcccttggggggcccagatccgtccccccacaccaggcatcacagatcacctctggcagcagggttagggcatcgctgtgggcactgggagctgctgggcctatctatgggacacccacctgtcccttaggaaggttggactgagctgagctggacaacaaatggcaagaacaggccaagagccaggaagccgggcttattctgcacacacagcacaagaggtgagacgccaggggcctggggagcccagagaggacacagtcacctgcggctctcccacaggggccgccagcaccgacctgccgggccaccaacagaccccagcatcagggctgaaagggctgtgtagagggcagccaaggtacccgagggccgaggcttgattccaagtgcagactctgggccgggcacagtggctcacgcctgtaatcccaacactttgagagggtgaggtgggcggatcacctgaggtcaggagctcaagaccagcctggccaacatggtgaaacccccgtctctactaaaaacacaaaaattagctgggtgtggtggtgggtgcctgtaatcccagctactcaggaggctgaggcaggagaatcgcttgaacccaggaggcagacgttgcagtgagtcaaaatcgcaccactggactccagcctggagacagagcgagaccttgtctcaaagaaaaccaaaaccaagtgcagactctgagccccaggcagccttgcccatcctcagggacacacgtgtcctggcagcctgggctaccctgcaagcgcctttgctggtgggacttgagagtgtgctggaggcaccacagtcctgagtctctggaaaggtgtgcacgacaggggctggagaccagcagtgccatttgccattcagcggcttccacgacaggtctggagccttctggcagtgcagagggttagcggggctgctgctcctggggtagaggtgttggtggcagcactgtggaacccgctatgacttcagtcctgtgcaggggaaggggacccccatggcagacagggatggacagggccagtcctcggggatctgagctgcaaggccctccctgcctgagtggggtctgcttggtgcgaggggaaactgtcatatcagagtcctccgggaagcttgggaaaaggctgccaggcccccacccagggtgaggggtcctcccgagctccggcccaggggccccaccccaagaactgctggtgccgtggctcgtttccctgaacccctgcttgcctctcggacgatgaggtgaacgttggcgccatcaggggccactccctggatggaagatagtgctcgggccctcacgacgtccacagcagcattctcagcaaggagccactgcagggtggcacagcacaggggcacgcctggaggggaggcatcagccgagagctcagcctgatcctaccaggtgggctcagccgatcctaccaggtgggcatctgcatacctgccccaaagtgcccttcccagagccatctaagcatcccagctgtccccagccccaccctaagctgcggcgtggccagctgacccagaggaaggaggccactgctcaactttctctgctgaacaagtcctacgttgggtggtggcagttacgatctgtggaaggtgaaaacctcactttgggggacctgctaatgctcctgggagccgatgttaggagcaggcagctccgcccggcactgggcagaaacaccccaggggatggctgcggctgccctctctgcacaagcccaaatccagaaaccatccaaatacccatctgcagcagaacggtgacatctgcacctgcgacacagagggtctcacacacatgggggagcaaaggacagacacaaagaagggactgcacactccatttcgtggagctcacacatgcctgatgaacggtgctggggctttggggtgagcgcagctgcctccctccccgggtgcccgcactgtgaagctcacagtttgctcctttgtgactcttctgtatttaggttacgcttccatatataggtttaaaaaacataactgaaaagaaatacatggtgagagggctccacataaggccagagcccaacagcagagagaacgcaggcgaagctcatttcctgagcagagctcgctgggctggggggccaggatgccccaggagcagctgggagagggaggaacagcccatgtccacaggcccgaggtgggtggggtgaagtggctcatgcaggtaatcccagcattttgggaggcccagaggagatcaattgaggccaggagctcgaggctgcagtgagccatgattgcaccactgcactccagcctgggcaacagagcaagttcctgtctcttaaaaaaaaaaaaaaaatccccaaggctgagcaaagccaagcagtgccaccaacctgagtggccgtccttcaaggcagctctgagcagctccgccgacaccttgatggaagccacagatgggggcaggtactcggcccgcagggaggcgggtcctgctggctggctgccaggctcccgacaagtttccagaaaagtggccacagggtctcgggtggggccgagtggggagggggcccgtgtgtgtggcggggccaggccagggaagcgcagacactgcagcatgtccactgtgtgcctgctcaggggcaggcaaacaccctcttgctcgggcaggacgtcggaggggcactcatccagaaaggggtcctcagagtctgagggggcaagggccccgcccaccacctccctgagactgtagaacagcgtgcaggacacggtcacgggcaggtcgagcccgccgttctcaccagggcccaggggtagcgtcacctcccgccgagcaccggggccgagctggtccacggggatggtgtaggtgatggcggagcaggccgagtccaggtcgagagcacaggagctggtgagcacctggatgcacagggtccacccctggtccaggctgaagctgctgctgttctctagcacgcaggtggccatgagcacatcctgtgtctgcaggcggctccaggtggtgctggtggtgcaggagatgggtctggggcccgtgccgcttgacagcagtgcacagctcacgttcatggcctcgttgaggcttgtcagtgccttgttccgctggtcaaccgccttctttagaaaagacactctgcgaaggacagacatgacccccgggagcggggggacacccacagcaccaggtgccacatcttgactcaggcctggtaggcaccgagcctggctccacgacaagcacacggtgggtgtggagccacgccagagagtgagcccccgccccaggggcatgtttctcccggccccacccacaccgagcctctctggaagctgcctccagccatctgacctgacctctcctcttgggccacaggaggaaagaggacagaggatgaagctggtgctccggggacctaggctaatctgccaggtatgagaagcgcaccacccacatctgggccacgcaggggccgggtggtgcattaccccacccttggctccccagaatgttcctagtgggcctcttttctcccttgcagccttcacagtgaaaaccaggggggtcgcaggcgctacagaaacagccctaaaccacagggacccggagtgacaggcccctcgctctcgggaccccagtggttatgtgaggggagcaggggaggctgcgcgcactcagtgtgttctctctgaacgtcccgaagccagtgctgcgggaggaaaagcacactggatcctgtgctgagagcagggagggtgaggactcagcaggggacgtctcccgtgccccactagggagaaagggtgggctgctggggggcagtcccggcttatcttccagaggtagccaggtagcctgtcaccaaacagtgggacgcatgaggctctcaagacatcttaagaggacaagtaacggccgggcacggtggctcacgcctgtaatcccagcactttgagaggccaaggcaggcaaatcacctgaatccaggagttcgagaccagcctaggcaacatggtgaaatcccatctctactaaaaatacaaaaattacccgggcatggtggcaggtgcctgtaatcccaaccactcagaaggctgaggcgggagaatcacttgaacccaggaagcgaaggttgcattaaaccgtgatcgcaccacaacactccagcctgggcgacagagtgaaattctctctcaaaaaaagaggccaagtagggtcgggcccggtggctgacgcctgtaattccagcactttgggaggctgaggcagacggatcacgaggtcaggagatcaagaccatcttggctaacaaggtgaaaccccatctctactaaaaaataccaaaaattagccgggcgtggtggcgggcgcctgtagtcccagctactcgggaggctgaggcagaagaatggcgtgaacccgggaggcggagcttgcagtgagccgagatcacaccactgcactccagcctgggtgacagcgtgagactccgtctcagaaaaaaaaaaaaaaaaaaaaaaaaaaaaaaaagaggccaagtaatggcctggcctggaccgttgccacccgaggacactcacacccaggacgaccccacacagggacgctacctcccaaggatggcagcgccagcctctacccggtccgagctgagctgctcacctctcagagatgttgccaattccagacagcagctcctttattttctgacctgcactctctgtggtcatcctggctgggccaggcatctcagagtccaggtccaggctgcaggtcatcaggcggcctttggcggacagggccaggagcttggtgccacctggtgacagacacacatggggcctggtcagcggctgggaggggcaagcagcatgacactcggtggtgtttccctggactccaggaaagaagttggaagacggccaaggccagtgtccagtgaggaagagaaagtcccaaggcaaatgcactgtcccgaccctgggcttctgtcagtggccccgagccacgccatctctgatcccacccgtagccctctcttccgcagtggagacagtctggcgtttcccttcaaagcccttctctcctgctgtgtatgtattttctgtggcgagatttattagcatgctcacaaggtgagcacacttggggaagtgcactggtaggaggtgtgtggctctattcctctcaccccaacactgggcacacacagctaaaaccctctctggctttttctgtggaaaacacaaaactagaattccacaatgccatctgcctttggtccagagcagactcacgggcaagccacaccatgacacgagcaagcgtttgcagcctttggaagaaaggcaagtccggaacagacctccctgggctgcttgccacataagacctgcccaggaggcgcttgcggtggacccccaagatgcagtttcctccaagtccacagccagcaagcagcaaactcagatcctaccaggcccagggccacaccctagaccccagaggcagagcaacaggtaggcccaccaccagcccctggcttgaccttgagacaagagagttaaccactaggctgtatcagcacccgtcagccttgcaaaagaacaagcccaggaaaggaaggcggcctgatagtagcagacagccaaaaagggtgctccaccctgggctcccatctttcattttagacagcagctcataccttcatgcgtcctgggagacgcggacagcgagacgacactgcagatgttcaggctggctgggcacagcatggggggcaggcctcccgggccttcttcgggctgctcagggcccagcggggtgcttccccgagacagatccaccacacagaggtcagaaggggtgctgtggtacacgcggccacccccgccacaggcagcgcagagcacagggcctgggaggcagtactcccgcagctcgggcaccagcttcccggactcatcccagctggccttgatggccagcatccggccgtggtgaccaaaggccaccaggcagtcacagtgcacatcctcgtcaggcagaaaattctctgcagcttctgcagcctgtggctctgtcttcaaggcccctatgaagatgacgggctcctccaggtgatggaggatcttgacaagggcatttgggtcaccaggggctgacctggaggtgaccagggccttcaggatcacacagcagagctggccatcagggagaccacagaggaccacaggtgactgcaggagggtggcatcagctccaaagaggagcccgaagagggcgtcctccagcgtgaagcccccggagcccccgaggaggtcgtgcgggaccctggagcctgatggtgacacagagcacagcactggaaggaagtggggggctgcaggctttcctgggaccccggctgggggcgtgtaggaggacagctccacctcaccgatctggcctcctggccgggggtcctccccaggacagggctgctcaaacagctgcatcttccatcgggcagggccctgcaccagggtgaccagcacactgtccagcaaggtgaacgcgcacagcgcagcatcgggaaggatgcaggcatcggggtccacagggatcacgggggaaggctggtcaccgtcctcgctgtccctgtcatcctggctcgtagacctttgagaacagggacgcactggtcaggcctgggcagggtgggattcccacgttctcttcacaataacctggcatggagtagtctggctcaggggttcccgcagtgacccccaaggccgctcagcagtccatctgccacatggcctcccaccttccccacgaaggatactcttgacaagaagtaccaggcatccaaaaccagcgtgaaccgacacctgtcagcatagaaccgtcaggctgaggcccaggctgcaaagtgcacaggctgccccctctacagcctgggccgcggtcagcagctgctggctctgcactgaagacaggcctggctgcccggagctcgcttccttccaacccagatggtgtccactgatcactgactcggggtcacggtgcctttgctgtctcctccctccaataaagacccaacctcgggggcgtgtctcaccagacagcaccgggccaccagggcccaaaggacaggatcccgcgccccgccgtgggcttaaccatgtgaaccccacttactaaggactgtgagcaagacacttgcagaaagagtgctgggggcaggggctccagataatcgggcagggatggcggccgaggcttcagagctggcggcagcccgggtccccaagcgcgatgaggtggggctgctcgctctgaagcagtccgggggcagcaggagtgtgcgggagggaggccgcgggcccgccctcacctgctcctgcccgggtggtccagcgacaggcagtagaggcccctccgggcgcacagcgcgtacagcaacctgcgcggcgccagcagctccaggtgccacacctggtcggggaaccggaacgccgcctgcggaccggggcgcgggtcaggccgacgcgacgcgcgggcccgcggtcttcattttcacgcgaaccgccgcccccgcccggtccctcccgcccccgcgggccggcgctcacggtcagcagcccgccctcctggtcgtacacgtagacgagctcgctcccggtggacaggaagacctctgcctcatggcacagcacgcggggcttgcccgccgccaggcccccgagagggcagcagaagcccgccaggtagcggacccgcggcgcggcgccggccatcgtgcgcgcgggcccgtcagagtgagaagccccggccgcgcggcggcggctccgcctcggagcgctttacggcagcccgctgtgcggcgcgacctccgccgtaaagcggtcggcggtgccgggggcgggccggaaaggacgcgctgcagggactccgggagctggggcggtcgctggtacccacggggagcaggggagccttcctaggggccgcggcaccgtgccgcaggtcgaggttgacccggccgggctggtgggagccctcggcggcttcatggccccggctgctgcacgggttccccagggtggggaagcgggtcctggccgagcagaggttgctcttgggcggggcgtctccccggagcaagcgctcagctactcgggcttttgcgtaaacgcctcgattctctgggctctcggagagcagctgggtcctgccggagcgcactccagccggggtcggggtggggcagcgccggctcttgtcgtcctagggatgggtctctgccctgtgctctgcgagccgccccggccgcccccgcgttcagggcccagcggagtgagccagcttaggtggaagtgcgtccctccctccgtggctgaacacgtggggacagggagtacaccaatggggtttctgggttgggggcagaggacaagaaaatgactgtgagccagggcaagatacctccaccctctccctcctggcagctctccacttcctccaggagagaagtactgaccagagaacgcccgtggaggggcctgcagtacggacacctgctccatgcccggaagagagcggaaaccaggcacaccattcacaagtaaatgaccaaggaaccccgcccccggcccgcctccctccgtttaagaagccaatctgaagagcgctaaggccagacaccctcgagggagaatctaggggcagggctgcaaaactgggcttggaagttaggcagacatcgtggagtccgggtgcacctgctggagcacaaagcaccacttgcagacatcctgaccgcccccctttgaggttggggtggggactgaccccaaggcaacggggatgtctgattctgaatgttgggttagacagactcaagtgcggcacctggagtcagttccttgctcctctcttctcgccagggctgctctgaaggtgtttgggctggaaatgctgtctttgatgctggggagtggggagaggagggccaggtgcatctcatttggccttcagagtcaggaagtcagatgccgcatcgttgtgaatttccccacagggatcctccgctggtcttctgaccgaatttccccacaggaatccgcaggtcttctgactgctagttttaaccctctgaagccttgtgagtcactcgctcacacacaccaaccccatccagtcctcccaggccatctcttccatacggatggtaacatgccaagactgtcctagaggaaatgatcacgatcacgtggaggaggaaacggacgtgggagaaggcccgccaaaccagcagcctcaccccgcggtttactccgctgcccaccccactctgctccgggggctggcaggcttttggccccacgccaagcccagctcctatctgcaacaagatttatgatcagtagtcatgtgggggaccttaagcatggatcccaggggaaagggggtgagttagacacaagcgaagggctgaaggccggctctccatcagctgctgggctgtgccgtgccccacctgtacttggcgaagagtgatgagggctgaggcagcctctctgtccgtgggtgtggaagatgcacacactcctagcggaagccttcgagacagcagcgcagaccgctggacactgcgtttctatgcccaacttggaggtgttatcatctccctaagcacgaagtatatgaaggagtcaatttaggtcagactgaggggagaaaaaccatgaagcttcaggctgtgttgagggcgaggagggctgggccttgagggacctctcctcagagcagcacagcccaataaggagaacacagcaggaaggtgaggcagggacccaggaacccgacttctccctttttttttttttgacacacacaggttctcactgtgtctcccaggctagagtgtagtggcacagtctcggctcactgcagcctcaacaccccaggctcaagccaacctcctgcctcagcctcccgaaaagctggactataggtgcacactaccacgccaggctaattttttgtcttttttaatagagacagggtttcgccatgttggccacgttggtctcgaaccccgggcctgagttctatttctaagcagtacaatttgcttgatttaatgggggagtggcatccagaactgttttaaattttttaattttggccaggcacggtggctcatgcctgtaatcccagcactttgggaggccgaggcgggcaggatcacaaggtcaggagatcgagaccatcctagctaacacagtgaaaccccgtctctactaaaaatacaaaaaaattagctgggcatagtggcggcgcctgtagtcccagctactcgggaggctgaggcaggaggatggtgtgaacccgggaggcgagcttgcagtgagccgagatcacgccactgcactccagcctggatgacagattaaaaaaaatttttttttaattttttgagacagtctttttttttttttgagatggagtctcactctgtcgcccaggctggatggagtgcagtggtgccatctcggctcactgcaagctctgcctcccaggttcacgccattctcctgcctcagcctcccgagtagctggtattacaggcacctgccaccatgcacggttaatttttttgtatttttagtagagacggggtttcattgtgttagccaggatggtctccatctcctgccctcttgatccgcctgcctcggccttccaaagtgctgggattacaggcatgagccaccacgcctggcctattttttgagacagagtcttacactgttcaggttggagtgcagtggcataaactcggctcactgcaacctctgcctcctaggttcaagcagttctcctaccttggcctcccaagtagctgggattacaggcgcacacacatcactacactggctaattttttctattttttagtggagattgggtttcaccatgttgaccaggctagtcttgaattcctgacctcaagtgatccaccagccttggcctccccaaagtggtgggattgtaggtgtgagctgccacacccagtttttttgttttttttgtttgagacagtcttgctctgttgcccaggctggagtgtgcagtggcacagtctcagctcactgcaacctctgcccccggggttcaagtgatcctccagcctgggcctcccaagtagctgagattacaagtgtgcaccaccaggcccatctagtttttgtatttttagtagagacagggtttcaccgggttggccagaacttctgacctcaggtgatccacctgcctcggcctcccagagtgctgggattacaggtgtgagccactgcgcccggcttttatctttacatcgaaccaaagaggatgccaaggatcttcactggctctcacataagacggccatgatcaggtactggctcactgcatggcccaggctgctgctttctctgatacaacctccccgagcctcctcacctcagctttttaaattttttttcagacagggtctcaccccgtggcccaggctggacttgcgatcacagctggctgcagcctcaacctcctgggctcaagcgatcccaggagctgtgggtaaatcgagtgaactgcactgtgttgaaggtgcaggattggagtccgggtgctgggggactcaccctctcgctcctggagtccagaagccaggacaccttggtcactgtcctgtggcctgcttcaccccagggccctccttcagaaattagttggagttttttttagtaactgctcaagtcagctatgagtcactgaccaaaggacaaagtggtgctgaacagtgactgccaggctcctatctgaggctcagagagcacttgttctagacgctttctgttgtcacagggaaagacagctcaagcaggaacacaggcagtgtgtcacccccaggcctcactccttgctgcacctgtgcagtctggccttcctgggctttgtccttcacctgctgtttgaccacatgtacctgtccacaaagcagtgactgtggggcagtcgcagggctgacaggtgcggcagaggcagaagaggcacccaagggcggcggggccgtcaaacactgacgcactctcctcctcccccagatgttagcactttaagaaacttatcgaggagccaaggttgggagggatcggctggggaagtgggatccccacctttaaatggaccatgcacatacacgtaaaacagtgatatcttggagacaagttatcaaatccccccacactgagcagatgccagacaacagttgagtgcgcaggaaggacacaccaggaccaggcagttgcttcaggcgcttttattaggttccactgcagggctggggtcaatgtaatgcaaatccaagcccagtgatgcacacctgtgagccgaaacagagccgaagcaggagcacctgtgtcccaggagcagctggttggagggagccagggccaggccccacctcctctcgggaccaggagactggcagccgctgtgttcacctgggcaggtgtgcacccagtcacccccactggattatggtgctggtagcatgagagggtgtgtccacaccaagggcaggtgaagatgcgaggtggggctgagacctccttcccacaagaggaggtggctgagcctcccagggcctgaactctcacagcagggctcacccccaagcctgtatgcttagctctgactctctttggacaataaaataaagtgcattactgaacaaagagtaactcaaaaccagaatcagacaaatcgccaatgcttttcctttagctaaaagacaaaagaaaacatgaatgatgtgaatgccggaacttcagagtaagggaaatgctggtggaggacaacggaaactataatagcgtggtggataaggacgagcgagtgggagaggaactggcaacgcggctctctctagaagtccgtgctgtccagcctctgcccagtggtgggggaaggccttggactcacagggaagcaatgcaggaagccttggccacctaggctcacagctcatctcaggaccagaggagacagcagaggacaaaacttcagtgtgacagctgctaggagggagagcagacagcccgcggtgggcaagctgggagttgcatccgcagcagtccgcttcaacccagctcctctccacccttcctgaccctccacaatagctctgccgtgaccagacccaacccaactggcccctggtcccaagagcagatgagctgcttgggccttccacttggtgtcccatgccaggcggacctggaggtgtcagccatggccctgaccacttcagaagccaacaggcaaatgttctctgttcatagtgccaagaatgtgggtcacgtgggcttaccccccaggatggacacagaagtccctaagcagtctgcagctgggccagcctctcccgtgggtgcagagcagcccagatgtggccatcattaaggcaaagaagcatcgagatgcccaccactccccgggtaagagccatgccccggcctggccacgccacagaggaacgcagagcacacaagcaggaccccaccacgtgctgttccagatcgcccagtctccctctattggtacactatcaattgtgcagtgccccagggaggtcccaaatggccctcacaagaggcacagcccctaacgccctcagccaggcggtgcagtgggacgaagcagcgtattggggagggccagagcatcggcaccggtgacccagctctcccacccaggccatcgcagggcagcctcagggcaggcgccaccactgctcctgctcagcccgcagtatctgcagttgctgcagctgtgtggcttggtagaaaagtctcaggcactgaggtttacttcaagggagaactgactggtgcccccgtccacactcatcaccctggacacaacctcgggggcttcactaaaggagggaaggatgtggaaactagtctctctcactccccttttgtgcagtttttatcttaaaaaaaaataaataaaagtcttctgggcaggaattactgataactgttattataaccaatgcagactttaaaatcccacctggacatcgggtgagaggaggagggcaggcagcaaaccgacctgcagacctgcagaggggagccgtgtccagggccactgcgtccccaccagacaacagctactagaagaggaaagtggccctcacaggcagggtgcctgccaccaagcagtcagacaagggggtaaccaagagctcccagccagaaaaacatgggggcagggaggccaaacaaaaagcactgaaaataaagagaaggctgggtggtggcagcatcggcccctccctgtgcgccccaattccaggtgccacgtagaggcgagaggtctttccaacacggcgggggacttgtcaacaggattaggcgtgaggagccgctctgcgtttccagtctggagactgcattcagcctgcagaataccagccgtggcgcccgctctccagggaggaacgtgctgagaagcttcagtgggtcagggagcccaggacagccagccccttgttcctccagggctgcccactatggggcagttacagggaacacactcagcaacgcttctggcttcaggaagggctgggctgggcccggtcctagccagcagagggcaggcgccctaggtcctggggaggctgcacatctcgcagtggcctgtgcctggctggttcatgaacgtgcagtgctgacaggcccacatggctgcagtggccgtgtgtgtggagcccccgacggcgccgtactcatggagacctgggagctgcccgccaactgtgcctgcagggtggaagagaaatgagcactcatcatttctggcccaccagagactgccagagtgtgggcatgggggcaggggcaggcagctgagagctccccgcccccaacatcccacccagtgctggtcctgcccacacagcactcccaccacaggcacactttgaagtgcttaatgccctcagaaaaatgcctcctgcaccacagggagtaacagggagcctgtgcttgctggttcctttttgttgcagagggtgcttctccttgtgaataacgtaactccccgggggatgtgcatttgggttgtttccagctttttttttttttttttttttctgaggtagggtcttgctctgtcacccaggctggagtgcagtggcacgatctcggctcactgcaacctccacctcccgggttcaagcggttttcctgcctcagcctcccaagtagctgggattacaggcatgaaccacaatgcctggctaattttatctattttttggtagaactagggtttcaccatgttggccaggctggtctcgaactcctgacctcaggtgatccacccaccttggcctcccaaagtgctgggattataggtatgagccaccatgcccagcctccagttttgagctaatatgaacaaagttgccaggatcattcttctacaatttctttgtggacctgtgtttttatttctcttggataaaaacaaagagtgaggctgggtgcagtgggtcacgcctgtaatcccagcactttgggaggccgaggcgggtggatcacttgaagtcaggagtttgagaccagcctggccaacatggcgaaacccggtctctactaaaaataattagccaggcgtggtggtagacacctgccgttccggctactcaggaggctgaggaaggagaatcccatgaacccgggaggggaagcctgcagtgagccgagaccctgcctcttcactccagcctgggcgacacagcgagactccatctcaaaaacaaacaacaggccgggcgcggtggctcatgcctgtaatcccagcactttgggaggctgaggtgggcagatcacaaattcaagagatggagaccatcctggctaacatggtgaaaccccgtctctactaaaaatgcaaaaattacctgggggtggtggtgcgcacctgtaatcccagctactaggaaggctgaggaaggagaatggcgtgaacctgggaggcggaggttgcagtgaaccgaggttgcagtaagccgagatctcaaaacaaacaaacaaacaaacaacaacaacaaaaaacctacctaggaatgaatctgccggcccacagggtaatgaattgtgtgctgaactttctaagaccctgagacacagttctcgcgagggtggcacggttttgcctcccactcgcaaggtacgagagtcccagctgcttcacatcttcactcacacttgacattgtcgcgtttttttcatttcagccacactgatgaatgtgtaacggcttctcatgttttaatttgcatttccctgatgactaatgatagtgactgttcctgcatctccttttttttgttgttgccgaggctggagtgcaatggcgcaatctcggctcgctgcaacctctgcctcctgggttcaagcgattctcctacctcagcctcccaagtagctaggattacaggcacgtgccaccacacctggctaattttttttatttttagtagagatgggttttcaccatgttggcctggctgtctcgaactcctgacctcaaatgatccaccgcctcggcctcccaaagtgctgggattacaggcgtgagctaccatgcccgacctgcatttccttttgtgaaacgtttcaccctccgcccagcttcttcttctgctttctgtttgattaacaacaggcagagttatttttaagtttcagatagaagtcatgttgtgtgtatgtactgctaatactgcgtcccccattggtgccttttcatgtttctaacagtgccctgtgatgagcacaagtgttttgtttagataaatttatttatcaatttacctatttttatgccagtgtttttctgtgttctaccccaaggtcctgcatcctgcctaaaagaatctttgcgtaccccaaggccctgaagagattcaacttaataactgttttacagtttttatttttttaagacagggtattgctctgtcattcaggctggagtggtataatcatggctcactgtgacctcgacctcctgactcatgggatcctcccatttcagcctccccagaagctgggattataggcgtggaccactcaccatgcccagctaattcttttttttttaatattgtttttttgtacagacggggcttcactatgctgtgtgggctggtctcacacttctgggctacagtgtcctccagctttggcctcctagagtgttaggattatagctatgagacatcatgcccagcctgcttcatagttttaccttttaccattaggcctatgacccatcctgagctgatctttgtgtcttgtgtatacacgtctgtaatcccagcactttgggagaccgaggcaggtggatcacctgaggtcaggagttccagaccagcctgaccaacatggtgaaaccccatctctactaaaaatataaaaattagccaggcgtgggtgcacgcctgtagtcccagctactcgggaggctgaggcaggagtatcacttgaacccaggacgtggaggttgcagtaagtggagatcatgagattgcactgcagcctgggtgacagggtgagattccgtctcaaaacaaaacaaaacaacccatgagggccgggcgcggtggctcacacctataatcccagcactttgggaagccgaggtgggtggatcacttgaggtcaggagtttgagaccagcctggccaacatggagaaaccctgtctctactaaaactaaaaaaattagctgggtgtggtggcagccacctgtaattccagctacttaggaggcagaggctggacaatggcttgaacccgggaggtggaggctgcagtgagctgagatcacactactgcactccagcctgggcaacagaacaagactttgtctcaaaacaaacaaacaaaaaacccatgaaaaaatgcccaacatcactaatcatcagagatgcaaattaaaaccacagtgagataccagtcagaacttacaccagtcagaactgcctattattaaagagttggctggacatggtggcttaccactgcaatctcagcactgaggcgggaggatcgcttgggcccaagagttcaagaccagcctgggcaacatagtgagacctcatctctacaacaaatttaaaaaatcagccagggatggtggcacatgcttgtagtcccagctgctcaggaggctgaggcgggaggattgtttgagcctggggaggtcaaggtgagactgacctcaaatgccactgcacttcagcctgggtgacagagtgagaacctgtctcaaaaaaaaaaggaggggggaaaaaaaaaaggtcaggtgcagtggctcacagctgtaatctcagcactttgggaaccaaggcaggaagatcacttgagcctaggagtttgagaccagcctgggcaacatggcaagaccacatcttttttttttttttgagacagagtcttgctctgtcgcccaggctggagtacagtggcacgatctcagctcactacaacctacgcttcctgggtcaagtgattctcctgcctcagcctcctgagtagctgggattacaggcgctcgccaccatgcccagctaatttttgtagttttaacagaaatggggtttcaccatgttggccaggatggtctcaatcccttgacgttgtgatccacctgcctcagcctcccaaagtgctgggattacaggtgtgagccagccaccgggcccggccaaccctatctcttaaagaaaaaaaaaaaacaccaaccaaaaacattagttgggtgtagtggctcatgtttatactcctaggtactccgaaagctgatgcaggaggatcgcttgagctcaggaattgaaggctgtagtgagctatgatcactccactgcactccagcctaggcaacagagtgaaaccctgtctctaaaagggaaacaaaaaagaaaaaaaaaaaaaagactggtgtcattgttagaactgcatcaaagggctgggtgcagtggctcccaggtataatctcaggactttgtgaggctgaggtgcaaggaatgcttgaggccaaagtttgagaccagtctgggcaacacagtgagacctcattgatacaaaaatattaaaaaattttgcagccataaaaaggaatgaaatcatgtcctttgcagcaacatggatgcagttgaaggccattattctaagcaaactaatgcaggaacagcaaaccaaatactacatgttttcatttataagtgggagctaaacatgggtactcacgtacataaagatggcaacgccaggtgtggtggtacacatctgtaatcccagctactcgggaggctgagggaggggaattgcttcaacccaggaggcagagtttgcagtgagctaagattgcgccactgcactccagcctgggagacagggtgaggctccagctcaaaacacacacacacacacacacacacacacacacacaaagagcagggcgggctgaaaaactattaggtactatgtgtagtacctgggtgatgtgatcaatcataccccaacctcagcatcaggcaatatacccaggtgacaaacctgcacatgtaccctgtgaatctaaaataagttaaaattatttttaaaaaacaaacaaataaaaagcaacaacaaagccccaagaattagctgggtgtggtgttgcaagcctgtggtcccagttactcagcaggctgaagcagaaagatcacttgagcctggagtttgaggctgcagtgagttacgattgtgcaactgcactccagcctcggcaatagagtgagaccctgtctctacaaaaataaaaataataaacaaagaattgtgtgaaaagaaaacctcggctgggcgtggtggctcacacctgtaatcccaacactctgggaggcagaggcaagcagatcacaaggtcaggagttcgagaccagcctggctaacatggtgaaaccctggctctactaagaatacaaaaattatccaggcatggtggcacatgcctgtagtcccagctactcaggaggctgaggcaggagaatcgtttgaacccaggaggtggaggttgcagtgaggcaagatcacgccaccacactccagcctgggtgacaagagccaaactccgtctcaaaaaaaaaaaaaaaaacaggaaatggtataaaggtgtttgatgtgtcttttgaaggctgtgttaacagaaggattctagcatttgtccagggccgtagctcccgggcactctggtgctctcagctgcagggactcagggcactcgggctgcacgaggcaccacggtgcgtgaggagtccctgcagcaatgctgacagaaggttctcacgagtggggaatcgttcaggacctggtgactgagggtccggaagacacgcaatgcctgcggtccgttccgtagtgtccaccagcaacaacatggatgctgcaggcttctcctccttacagctttaagcactaaagggaaattctcaaggagaccaaaaggtcccacgcttccggcgcttccataaagtttctgattctcttaagacaatgatgttcaaagtgctcctaggatgcctggagattagtatctctgatgtacaggtttataaaatttacagggctgtgtacctaagacgtacggcctggacaacatgtctgctccatcaccggagcctgccacgtgcctggcagggaggccgagtctctactcgttgcattgccgatggcacctgccaggatgcagctgggtgcggaatccagggcaccaccggcagtggggagctgtgcagagtgggctgctctccggccccagccacggggtgccggggcagggggtgggggtactcactgcacagctgctcgatggtggcccactgctcagacctcttccatgtctgggcgagctcctcatttctggtccgcacggcctccagcagcaagctgatgctgtcctacaagaagccaaaaggaaggttcctcttcgctgtgcctaaggtgagcagcttcctgctagaacaggtttctttctccccaacatcaagacgtatttctgaggacattttaaaaatcttacaggctatcactataaaatgcaaactgccacaacttacatctataaacgcaagtgctaaattgaactagaatttaaattcttcccaaataggcccaagcgggcatctgtgcctctgccttgtgctgacggtgctcaacagcccggaggataggagctcatgcctctcgtcctggaggctgggatggagggcggaagtcttgactgtgagacgtgtcctcctccctcacatttcatccctctgcctctttctcctctcgtgtctggaaaaatgcactctctatcctagccttccgagtcaaactgcaggggattaatgcattaaggatgggcgcagtggctcacgcctgtaatcccaacactttcagaggcagaggcagacagatcacgaggtcaggagtttgagaccagcctggcaaacgtggcgaaaccccgtctctactaaaaatacaacaattagacaggcgtggttgcgggcacctgtaatcccagctactcgggaggctgaggcgggagaatcgcttgaacccagaaggcggaggttgcagtaagccaagattgcgccaatgcactccggtctgggcaacagagcgagactccgtcttaaaaaaaaataattcatatatgagaaacggataaagccttcaggagctctcagtacctccagagaatgtcttccaacagatgactgcaaaaatagtgcagtatactagcaaggtggctctggtgtagagggagcctcacctttcaccacctgtccagacagatgggcagcagctgaacctcggagcaggaggtgcagttccctgggctgactagggaaggcacaggcagggaagaggcacagggtgcctgatgtcaaatacccgagtgagtggttttgagacaaaatacagacacaaaataaactagcaggatacaagaacagctataggcttcctgacagagaaaggccgggggaggaggagcctctctattctgtctccttcagggaaaagttctgagtcagtggcggagcagctcagaaagaatttgctcctttctctttggcatttcctgttggcttgaacagtgaagaaaaagccaaagtcggacccctacacacggcaagaacctcctgggggctgctgcccactggcccccactacccagagcagccacttctgcaaagcactcgccctcttctcccccaacggtgtctcttaaaaatgccaactgtgcagctgtgagcttggggtctggaagctggccaagccttctgggccaaggcaataaaaccagagttgatttaggaggaggggagatatgagtaaaaagcagaggctgtgactctgaaactgttagaacaggaattttttaaactgtctaactctaatgctggaggcagagctaaatcacctctgcttcccattcgattgtaacagatgaaaccgtacttcctcacagaggtgcagacactcaatggaaatgctaaaggtgaaaaaattaatctttctatcaacaagcttcttgtgaaaagctgctgcctacactctgcccataggacaaatgagggggacaacctgtgaccccgagctttgacccagtttcccaatcatgctctggtctgggaggaaagaaagcaagacacaggcgtctctttgcagccaaagcccacttgctcaagtggacaccacacttggacacgcacctgcagaggcataacttcattggtgaccaggaacagcaagaggtggaaatctgagatggtatccaagaacacagatgaggtattctgagacaaataggtggccaagctatggaagtcctagaggaatgggaataaacatgaatgttccatacagttccccagtgccagaccccgaaacagagctgtttcctactaagacgcaactcaatacactgaatgctgagacacctctccctctgcctctgcaaccacgaacagggtccaagaaagaggagcaggcagctgcaaagcaagctcttgctctcttctcccaagaagatgctctcagcacacctgactacccagatgtgcaaggagacatgcttataaagctgactcagactggccaggtgtggaggctaacacagtaattccagcactttttaggaggccgaggcaggcaggtggtcaggagttcgagaccagtctggccaacatggcgaaaccccgtctctactaaaaatacaaaaaaaattacccaggcttggtggcgcgcacctataatcccagctactcaggaggctgaagcagaagaatcgcttgaacccaggaggtggaggttgtagtgagccaagatcgcaccactgcactccagcctgggtgatagagtgagactctgtcttccaaaaaaaaaaaaaaaaaaaaaaaaaggctgactcagacagagacacaaacatggaaatgcgccctggtcccccggtggagagtgggctgcgggaggggcctggggcccccttcacggcagggagacaggtctgacttttcctgtcgagctgtattctccatctagggcagcaagagggaggaatgtgcagggcagccgtgatgcagcacggacatcttcagcagaaccaaacacagagcttcaagagtgcaccccaataactggctttgcacctctgtgagcaccccaagtcccctgggcggatgggcactgaggggatcaaagcatagaagaagctttgtcagccactgaagaaaacctcattatagacattctttgaccaccttctgaaatgtctgttagcaagttatgatttaagaacaaccatgtgtacacagcctgtctacacagtatgcaggcgtgacagcaaatcggacctggcctgatctgccagtgagagcagaggccaacacgggagccacgctaagcagcagatcaacactacacacgggaaagccgaggccaggccgagaggggccacacagccccaaggtgcctaagaagggcagcaggtgaccaggcaggggccaggccaaaccaacagtgacgaggctgctggcagaagacacaaagcaacacatttgggaaaattacgaggtccactgaagatgtggccagtcaggacgtcaggggattagcctttgtggccgtccatcacctagccatgggaagggcgtccacgtgaccagcagtgccccacagtaggccctagctggcctgtcacaagaatgaatcgggagcatttgaaagcttgatgttttctggaaaaacaatactgacactagataacaatcagcagttaccttaaattatgtttctaaagacaaagagctcacctgtgtctcacccaatacatcccggttttcaataggaaatggattttgcgaaatagaaaaagtgtaaactggatccttggggaaagttgttgtgatctaatgaagaaaaacacaaacccatgataaatgaggctgaaaatggtgtggccgactcccagccagcccagagcatctcccagagcccaaattaacgactcctagcaattctgagaatgttctacaagctctccatcaaagggaaccgttatctattagtgtcatctctaaacgaacacttggaaactccgccatcctggagacaaactacaccatatccgggcagcctccggcctgtgcaccggcctcgacgtcggacaaaaagggcactgggactcccctcgtggcacagcttcccttcagagtcacacaggttctctccctctgctatggaggaacgaaaggctggtttggccccttggccaggtgacaggaaaggaacggaagggccaggaggccgccccaggagctgactttgctcaagagagattcgtgtcattggattcggagggcaaatgagcaatcagccagctttcaagacacaaagcacccttcagcagctcactaagccccttctgaatgctgggagccactccacggagctgtgggcttttccaggcaggggtgaatgtaaggcccttgaggaacacagggttcagctcttctctctccctcagagctgatacccaaaggccagctaagtccttcagtccttcactggctcagacaggccttaatgacaacagagggcactttgcacctaagatataatcaatagatgctacagggacagtggtaaatgtgcaagaatcaatagaaataccacttttattcttcgtgacagacacccctccccaaagcagcaccgagttgagttgatgctgcttttctctgcaacacaacagcagcagcagaggtcacacctcttccagatttaggggaactattctggttcctttgggactatttctaaagaatgagtgtggttctggtctgttttctgcatcagcaaaggcagtgagttgttgagctagctggcccaggatttgctgtgccagcgccagccgctgtggaaggacagctgagccaccagcagcatctctggcctgagctggcccttcatgggcaagcggcggggtgggtcatgaagactcgggccgcggtgccacgtgtcggctacatggcctcgtcagttagggatcctgggcctcactttactcttcctcaggatgaagatgatcggagtactcgcctcctgggtgcccagcacggggctggtacacatagtgttggtacacacagtgctgggtcccagctgaagacaggggaggtgctgacctcctgcagagacaaaagcctggcctgctcaggcgcgtcccttgggaaggcctagaaatgaagaaggcggcacccccagaacacgtgctagtgagtgagctagtgggactgacgggggctcttgctggccttgtaactggcccttggaggggaacagaaccaaagtccacacagcccatcccagatgtcccaaggaagggcatcagctcccatcttacactgaagccatttccctaccctacccatcgtctatcagccagatgatgcccccagaacccacaaagaaaccccagtaacactggctggtgccttttcctgcctgcccagccatcccatcccaaggtttaagaaccttggctgaggccagcgcctgtggcccagggctgggcatggagcttgacacacctctctgggcacctgctctcaaggactccccatgcctcacttccacagggtcaaggagcctgggcatcacagagcagaatgctctcccacaaacaagtacttctgaaaaactgcactaaggcaaaaacttaacttcctttataaaagaagaggaaagaagtggggaggctgcttggggtagaagacctgagaaagctggttttaaatcatgcctgctcctcctgggtgcatgctccatcaatctgttttcatcttaattacaccctaggtagtctaaaaaccagatgccttcacggcctaggtaataaatatgttctcgggagctgtcagttggaatggtgcatcgatgggcttggctcgtggggacctgctgttccgaatgcaatgatattttactgcctgaatcacgtgcccatccaatttcaaatgcagcctgaatagatcctggcgtggcagcagcataggaaatgagccgcctcccgtccgctttggacagagctccggtggggctgatgcactggcttctgcaaaggctcatcctgccatccttgctgccctgtggccaatggtacagccatgtctccatgaccataaaatgcctccaaaaaggagctgagacacagggaagatgtggaagagccaggggcctttgtggctcctggagttccacccagtaaaccacgctgagccctcactcaagaacactgagttacaggtgtgtcccctggggaccaccctggacggagtgacccagacacactgtgggctgtggcagctgtgctggggctagggcaagcacctgcacgtgcaggacagctgacagccacacaccaagcacagcacatctggacaagactgcttgatgctccggtgactggagacccaagcaatgggggttcgctgccttccagaggctgcctagcctggggtcagtggtcctttgtactttagtatggggacagttaacccctaggttgacgtcaaggaaataaaaacctgagactaaaacaaaaagcccttaaaactgtgagcatttcagcaacaccgcatgctcagtgattctacaaccacctcctgggtgcctgttctggggtgggcactgctcaaggcagagggtgccttaaattgcagcctcctcccttgagcagccaccacccagcagtcccacctacaaggcgcccaatgggtccacctgcccaagctgtgcatggggggcacttacgtctatgatgagatactccacaggcaggggccgggccagctgggtgatctcgttgccaaacttgtctacgtcctgcaatagtcagaggggaacagcggtgagcaaagacgatcagtagtaatgattttcctttcacatgcttgtctcaccttttatttaattaattaatttatttatttatttattttttgagacagagtcttgtgctgtcgcccaggctggaatgcagtggcgtgatctccactcactgcaagctccgcctcccaggttcacaccattctcctgcctcagcctcccaagtagctgggactacaggcgcccgccaccacgcccggctaattttttttgtattttttagtagagacagggtttcactgtgtttgccaggatggtctcgatctcctgacctcgtgatccacccgcctcagccccccaaagtgctgggattacaggcgtgagccaccgcgtccggccttcactttttaaattacttcaaatcttattgaagtgtatggatagcagaaaggaaaacgtgcatatttttgcagtaaaaccaccttccaccatttcttggagctcattataaccacagcctgaaaaagcagtcgtgctctcgggcactgggactccccactgggagagcacatcaaatgcctcctctccacccatggcgcttggcctggcactcaggcgcgatctgcgacaggcagaagggtctgcgttcccctcaggttggacctgtgccctgtctatcctccaaaagcacatgaatcctcacagtctgaatgctaactcttagaatcttactcacacctctgaaaacccgactttccagaaaccgagtacttggacattaataaaataaaggcatgcacaaatgagcgcacacacaaatatgaagacacgggaaccccacaccaatctgtcaaagtctcaacttgttttgctttgtcagatgcacagaacataaagtttaattatggggaaaaacggccagcatatgttcattaatcataaaatgacaattagatctgatttatgtcaaacatgctgagttcaaacagagctccagaaataaattcataagaaccaaagcttttcattaaagattctgcaagaggggatcacattttctatctaaatcatcacttaacattatataaatcattcattaagtcatatataaattatacatccataatttccaattatagggccttacataaaagtttacgtttattggagctctcagacccgaaatgattgccaagcaaatctccctgaggtgtgcagggtgacaggaggccacccccatcacaaccacaccttcctggggatgtcaggaagccccgctgtcttctgagacaatcatcacaagctgttcccaagtcaaaccaagtccattaccctaatgagaagccccaggcccccatttggcccttggccctgtttcttgcttgaaaattaaattctggctggtccgaaggtggtgagttacctcagatgattgttaacagtcagttacagatccaactccttgttctactctctcccctttcctcactattgtacttgactagtcttaaaaaataataaaaaatttttaaattcaatttctggcctgaaatgtgtctcagttctccataccctcacaccttttctctactcacagctagagagctgccaacaagaacttgcctctaccctcccagagaaaaatggtccaaatagatcccactgatgtttccaggagggcaggagaatgaacctggactctatttccatttcacgtattgctccccgccccatcaaaggctacattcctgcaaatacacagctctgctctgtttgccttccttggacactgaaatgactttccaccgacttgggtgagggtcgtgtgtcctccttccacgtgacgagtggctgccagtcaggatgggcttccgcattctgcgctctgctggctgtgatgggggcgctaaagacacagggcctactgcacggggtcctggggccccaaaagaggtggtttctcaatggagatttggtaggaggcaaaaatcaaatccagtcaaactaaatcaccatttccaaaaatacaggcttgcccctacaagaaataaacctgcaacaactcacacataattagcccatctggaattcatcttcaaatctaattaagctctaatatgcagaaacatttttccagcacctgttcactttaatctccccctctagggatttttcttgttaaatgcccctctctcttttttgtgtcatgctattctctttcaaacttaactacccaactgcatcttttccactccccaagaaaataaaggtgttgtatccccctttcctccctggggaaacaggtcacttctacctctcccccaagccttcactcagatgttttcgccagccaatccctaggcctacacaccattttaaaaggcaattactttttatgggccttagaaaatgtcagttggaatgcgctgggaggaggttgtcttaattctaagtttggcagccgtcaaagtgtcagcagctttatctccacctggagcgaggcaccaggaggtcggaggttgtggccccaacacctcgccacccgccagaggccacttctggaagcagtggcgccaaggtcttgacaccaagagaaatccagggatcgatgtctttgttagctcaaaagcaatggggatgcccagggcacagtggctcatgcctgtaatcccagcgctttgggaggccgaggtgggcagacggcttgaggtcgggagtttgagaccagactggacaacgtggtgaaactccgtctctacaagactgtctccaaacaaacaaacaaacacacacacacacacacacacacaaacacaaaagcatgtgggctttatgccaggacaacagtgaattccattgattgaatggcatcaaccctgctttagaaaaggtaaatgaaatcctgaatgtgctgcttttctaagaactggcaagaaggggcacaaatgacaccaggatctgagccgccacaggataactcagaaaaaacaaagctttcagacactcggttacttttctttttttttgagagggagtctcgctctgtcgcccaggctggagtgcagtggcgcggtctcggctcactgcaagctccgcctcccgggttcaagccattctcctgcctcagcctcccgagtagctgggactacaggtgcccgccaccacgcccggctaatttttttctattttttagtagagacggggtttcaccgtgttagccaggatggtctcgatctcctgacctcatgatccacccgccttggcctcccaaagtgctgggactacaggcgtgagccacagcgcccagctgacacttggtttcttaaaagcaccacttagaaaatagtccagtccgtgtgcaacgactggatgcacacagaactggcagctggcatttctcaggggccagctgtgtgcacagagccacttcgtcctcacaaacacactggtcacaggcactactgctgtccaagacaggaagggttacaaagatgagtgaacctcctaaagcaatcggcaaggacagctggacagctgtgtagagactgggccccccacactacgtgcgcaggctccccgcctcccaagtcagtgccggtgctgcagggccagggcacacgcaggcctccctcctgcctttggggaaccttgaagttgaggctcggaccccaacagccgtctcacactgagtaagactctcccacctccaccgcaagggaagatgcaaaattttctcttaagactgggaatatgctataataagtgattcagaatctcttctgtcgatggcagtttcttgattaattgataaacctgcctgaataatgctggaagcaaacacaatctcctatgagtgaaaaggcttgttttaaaaagttgcgtgctgctgggtcttgtgccagcaaatacaagtgggttacagggctatagcaaacagagcagtttggtaacaacaaaggaatagattgtaggtaagtggcacagaggacgatgaccagaagtaagacatgaggagacacagataccttgttttacaatgaacagtgggactaggtcaaccaggcaaacatctagagaagcacaaaagctagattcctacctgtaccagtatcatgcataaatggattatggatctcaaaataaaattaaatcctaaaagcacggaaagagtatgtaggtagatgcatagttctgggggaaagaattacagttggccgttgcacaacgcgggtttgaactgagcaggtccacctataggcagacttttttcaaccaaacacagattgaaaatacagtattcgagggctaggaaactcatgtatacggaggtctaactttacatataagcaggttggaaggatccactttggggcgtgagtgcatgtggacttgactatatatggaggtcctggaaccaatcctctgtgtcaactgaggggcaattgtacttccaaagtacgatgacaaaggcagaaattacaagaaaaagagttaaggtatctttgaaatcagaaaatatttcagcttctttgtataaaagacaaagaacgaaaacctggcgtgtgtttgcaacacacgacaaagggttaatatacaaagacctcacaaatgaatgccaaaaatgatgaatcactttacaaatacttaagtgcacacagaggctactcacaaagaaaacagtcagtaaacacaggagactccctgtggtcaaagaagcacagagagcggggtcctgggcctgcctggtccttgccagagtcacgggcgcgagggcaaggctggtctgcagcaccacctgcaagtgtccaccctgccacattcccagaggaaacgtgggaggacacacagacccttcgagtacatagtaagcttcggcaacataatcctagttctagcaattcatcccaagtaatttaaagcatgcactaagaatgagttacagggtccaccaagtgctgttcacagtgccagatgccaacaaaccccacggcctgctgagtaagcaatgcctggccacagcaaggggcagtgggttcctcagagataccctctggcccctccacagctggctccttgaaggaacgctgttcccttgctgctcctatgtcccctcagctccccacggcgctctgacccgccccaccccatcactgtgtagtcctcgccagactgcctgtccgcacagctctccagacagaggaccccagcactgtcccttggcaccaggacatcaccctcccacctctcccagacccttctccttgacctctttagagcagccatccttggagttgctcaacgccctcttctcttctccctctgaaccacagcttggctcatctacttccgggttagctcaacgccctcttcttttctccctctgaaccacagcttggctcatctacttccgggttagctcaacgcactcttctcttctccctctgaaccacggcttggctcatctacttctgggttaatttaggctttctccacagatagtctgaaaagggaactattggcctgtatctcttgcctgagcttccagacctgagtcctggcaaccgtctgtcctgctccatcttcaaactctgcgtgctggcacctggactcaccatcctcccacacagacccatggctctactctggcaccagtgccaaccctgctccccaaaaccaggaacctggcttgagcctgtgctcctctctgcacacctgccaggcctccaaacctctcagtcccagcacaccatccttgtccccaaggccacagggaactgacatgtggcctggattgccaacaccaccagcttctcactgggctccccaactccaaaccgttccccacactgcagcccaggatgggtcttctacagcggggacctcccctgcccaccccatccggctgtcagcacctgtccactgcctctcctacctggatttcagccccactcactcctctaaacttgctgccttctcctgactcaggctactggcatccaatgcctggattgttgcaaaagcttcccgcctccagaccacccctcctgacacctccagcaggaacattccagaactcactttccataagtctttccatggcctcccactgtccaccacaagccactccagctagactggccccgccgggtgcatgctgtgctctccaggtacatagcttcagcagattccactccgcgtggcttcctctcacacactctagtctcagcactgtgaatggccacctcggcgcaccctgctccccaacaggacacctccacagtttccaagaagagggaccatgagggacctgctcaccgtggcgccccaggcctaacacctgacccacgggaagctctcaacagataaacggtacgactggtccgttttctcactgctataatgaactgcccaagactgggtaatttataagaggtttaattgactcacagttcagcatggctggggagccctcaggaaacttacaagcatgacaggaggggaaggggaagcaaggcaccttcttcacaaggtggcaggaaagagaagtgccgagcaaagggggaagagccccttataaatctaacacatcttgtgagaatgcactcactatcactgagaacaggatgggggaaccacccccatgattcaattatctccacctcatctctccttgacacctggggattgtgagtcaagatgaggtgtgggtgtggacacaaagcctatccatatcacaaagggtgctagggggcgtccattttcttcttaccaatctacaatatttaattttttcataataaacatacatttcatttcatatttaaaatgttccatatttatttatttagagacagggtctcactatgttgcccaggcaggagtgtagtggtgcaatcaaagctcactgcagcctcgaactcctgggctcaagcgatcctcctgcctcagcctactgagtacctggggccacaggtgcacacagcatagactgcatgcattactgtttagcgtggtggctcacgcctgtagttctagcactttgggaggcaaggcaggtggattacttaaggtcaagagtttgagaccagcctggccaacatggcaaaacccctctctactaaaaatacaaaaaagaaattagctgggcgtggtggtgggcgcctgtaatcccaagtacctgggaagctgtggcaggagaactgcttgaaccagggaggcggagattgcagtgagccaagatcgtgccattgcacatcaccctaggtgacagagcgagactccatctcaaaaataaatagacttcgagctgtctgatgcatgtggatctttagatttgagaccctcctgctgccagcctctccctcctacctggacaacacccccttcacaagttcctggtctaaaaggtggtctccactccagcctcccccttcagctgaccctgtggcttcctgtgagcaagctgatccccaaacctgcatcccatcgctcctgccagctccacccacctctgcctcccatcctcattgtactgacctgtctccagatgccccaaagctgtccctgacacacggaccatgccccttcctctctgtgtgccaattagctcctttgctggacaccaggaagcagtacatgcccatgtcagtatttcccttacgttaataaaaacccaaacaagaaaacttctcaatcccacttcccatactggtgactgtcctttgctctccctggcagtgaaaccccccgaaagagtcatgcagcttgctgatgtgagctcaccccccattctcctctgtgagctcaccccccattctcctctgtgagctcactctcggcagccgcttatctactactcagccaggctcatcaaagctcccaacacccctgagctgctgaaggcaaagcctcctctcctgactcaccagggagctcctttcttgcctgccttccagggcgctatgctcctgcccctcctccccagctcctgcctcccagtgctctccacctcattcccccaaggtggggttctcctcagccatcccctccaggatggacaactcggcctctcaccaggcctcaagcaccaccccaacaccatctgtaccatgtgcctctcccaagcaatgcgctcaccccgggtggtgcctctgcactagcacatcgccgacagatccccagccttccagcctggcctggacaccctggagtctgcctgcctcttctctcgatcacaccacacactcaaccccctcactactgcacagccatctctactctctaccctagtctccttttccagctccgagcccagcagccagagtgatcgtctcacagccccggcacagccatctcccttcagcacctttcagaagccctcatctcacttccaaccatagattcagcttccaagggcccctcccacctctaccccagcaggccaccctgcttatcactctctgtgtggggaacaggctgctgcctctgtctgaacaatctcctccagacacccccagagctgctctgccaattgacaccttctctcccctctcaggactcgacccaccagggcactccaagcttctctacccgttccgctggggtggcccacctcccctgctgcagcagtctccccgatgcagggagcccttctccattctccatgaactccagggcctggcaattcacaggtgttctctaaacatgagagaatggatgccgtgagagcatcgcacagtgaatcaggtcagtgctaccaagggcttggccacccaaacacaacagctctcgctccccgctcagctctgaagggcccagggccagcctcccatgcccacagctgggggcctgggagagacatggcatggaagtacaaaatccccagtggccctgggccagcccacccgtgggcttatgcccgtcagactatttcctcatggctgaaggagaagaaaatagagattttaaaacacagtaaggctggaagcggtggctcacaccttaatcccagcactctgggaggccaaggcgggtggatgacctgaggtcaggagtttgagaccagcctggccaacatggcgaaaccctgtcgctactaaaaatacaaaaaaattagccaggcatggtggcaggtgcctgtaatcccagctacttgggaggctgaggcaggattgcttgaacctgggaggcggaggttgtagtgagccgagattgggccactgcattccagcctgggcaacacagccagactccaacgcaaaaaaaaaaaaaaaaaaaaaaaaaaaagttaataaaatcaccatgtcacaaaagaactgaaagccagccccttgtcaaagtgcccaattgttacttgtcctcaagaggctccctcaaacccaatcaaccaattctccctgccccagaggaataagccctgtggacgcccagacccttggcataggtgcgagcagtgaggagacaactggctccagccagaggggcagccagtcctccacagcaccaaggccacctctcctcactcccccacaacgattacagaaatcagccagtgaaggcagtccatgggaagagagtatactcccggggcgccagccagcaaggtggtaaaggcacagctacaaagccaagtcagattccagacactagagccactgtcccatgtccagaggagtgggaataaaaggactggaggctgtgtgatctctgtggcagaagggtcgtagcctgccacatcctcacacatcacacagacgcaggaaagagcatcccgaaagcagaggcgcaggaataacttagaccttctgggcagagctagtagcctcgctatgccctggatggagtcccagaccatctcaaaatgtctctgggacgtgctgacagcagagacatgcttccatggtggacccaccacaccctagtgtcagagagggaacatgaggagggctcctctgtaccaaagaacacccgaggggcccagacaccacagtgaatcaccagaaaacatggagcatagacagagccagtcggaagacttacttggggaacatttccagagaacttatgattctaggagcccaagctgaggcccagcggttgtcctgcaggctgcagcagcacaaccaggagggccgtgaggtaagcgagctgtggcatgacgggcatgaaagggcaaagctgaagatgcctgcacgtcacatccgtaccaggaggttttcagctatgatgcccgatgaggggcatggacccgagtttcaccttcagtgggaagcagctgaacacctaagcatctagcggtgttctgtgtgtgtatgtatgtctgcatgtttttggaggagtcttgttctgtcgcccaggctggagtacagtggtacaatcatagctcactgcagccgtgaactcctgggctaaagagatccttctgactcagcctcctgagtagctgggaccacaggctcatgacacagcacccgactaatttttttttgttgttgtagaaatgaggtcttgctatgtcacacagactggcctcgacttcctgagctcaagcaattctcccaccttggccttccaaagtgctgggattacaagtgtgagccaccacacctagtctattagtattctttttaaaggaaaagacagaagacagtcaagcgcctcctggctgtacaacagtctacgagtgtgagtcttgtccctgtgtgatgggcaggaggtcccagcctgcccaaacaaaacccccaccagctgggctctggggctgcacataaagctccacagctgcaggctcttggggctgatgggcagtgagccacagccagcctcccgattcgaagaaacacacaaaaacccaaggagcctcccggccagggccaggcctcctccctgcggcgccgcccctgcgcactcacaactgagcgcccatgtgcgccagcacagcagccactgccacgtgacgcagagtgtgtgtgacacacccatgtgcattcatggctggaaagttattttaaactcttcttcctaattatcaagagagatgttagtgtgacttttcagtgagcgacttggaaatatctatcaaaactcgaaaaaccttcctccccagcaattctattttgaagatatacaaagatgtcacaggaggatgtatagggtgttaaatgtggcactttctgtaacaaccaggaagaaccaaaggccatcaacacaagaccaattaaatacattctgatttggccatatagtcaataaatgcactcatttattctccataattacaagtctttgttttgaagttaaaagaatagaaaaggaaacaagaactctaccagatgcaaagagtagttatcattaaatatgttttcttcatgtttttctgcaggggacaaatgttccctttcacaagaaaggtgaaagagaaaagccccacgtcctgccacctggctgccccagagatgagtgaggctggctggccctagtccctcgggaagctcctggtcctcacaggactatgtgtacacccatatgctttcctaaaaaactacacgtgaacgatgacacaaatgtgccttcaaatcacttctccaaggccagcatctgcacagctcccctcatctgtccacaaggctcttcctcgttctcttactggctgcatatgggacagggcaaagctgtagactctcctccctcctgaaggacagtcaggaagcttctactcccaccccatgtgtgagtgcatgtaaatgtatgtccacatccatgtgcaaatgcctatacgtgtcttcaagaaaataacaaaaaaaattggtattatactctaggtatagatgcatttttaattttgctttctaagttttaccccttatctttaaataatttgcaaacacatacctttagtaaccacatgctatcccagagtccagctgtaacttaatatgcccttgggacagggcttttcaattgtttcccatttttattgccagagacaacaacatgataaacagcagcctcagacaaatattggtgcaggttttgtttacaaggcatgtcacctccaaccgcaaagtccatgggaggactaaaaggatgacttcaatgtttgcttttacagttctctttgctccaactgatattttcctgaaacatgagaaatctgtctcaaatcctacagggctataaacaattctgggaagtatttctagcctattctcgctaacagagggcaaataagcactctatgaaaacaacagaatgattaaggaaatgtcacatatttcatgacaaaagggagctccattcctaagtgcaagaaacttacaataacgcatggaaataaaaaagccaatttccaatctgaaaagggtatttaaaaataatcctacagcaaactcacagttaatgataaaatcctaaaagcacttgctttacaattaaaagcaagacaaaggtgccagagacttccactgtcatgagtgctgtttgggagatcccaggcaacactgggaaaagcccagagaatgagaagggctgatgatggaaaggataatacgtgtaggaaatgcgaaagactaaacttataaataataatactgaggaacagatagcagttgctggatacaaaaatttacctgtttcaaacaccaacagtttaaaaatgtaattttaagatagtgctattttgtaacaggcttaaaaaaaattaaagtacctaggaataacctaacaaatgataggtaagacctccacagagaaaactgaaaacctttctaagagacattaaagaacatgggaacgaggcccagcacggtggctcacgcctataatcctagcactttgggaggccgaggtgggcagattgcctgctgagctcaggagttcatgaccagcctgggcaacatggtgaaaccctgtctctactaaaatacaaaaaatcagccaggcgtggcagcgtgcgcctgtagtcctggctactcgggaggctgaggcagaagaattgcttgaacccgggaggcggaggttgcagtgatctgagatcgcaccactacactccagcctgggcgacagaacgagactctgtcgccaaaaaaaaaaaaaaaaaaaaaaaaagagtatggtattagttctggtttaggaaaactggccaatggaatagaacagagtccagtaacatccatgattcctggagatgaccgacgacagagaagcatcaaagattaaaagggaaacaaaagtttgcttttattcccaaaactgtgctcatatagctgattatccacatcgttaagaaatcaaggccgggtgtggtggttcacgcctgtaatcccagcacttagggaggccaaagtgggcagatcacgaggtcaggagtttgagaccatcctggccaacatggtgaaatccaatctctactaaaaatttaaaagttagccaggcgtggtggtgcacacctgtaatcccagctactcgggaggctgaggcaggagaatcgcagaactcaggtggcagaggttgcagtgagccgagatcaggccactgcactccagcctgggagacagaggaagactccatttctggggggggggggaaagaaagaaatcagaggctgggtgcagtggctcacatctgtaatcccagcatctataatcccagcactgtgggaggctgaggcaggcagattgcttgagcctaggagttcaagaccagcctgggcaacatggtgaaatcctgattctactaaaaatacaaaagagttaggtgggcatggtagtgtgcgcctatagtcccagctacgcgggaggctgaggcaggaggatcacttgagcccaggaggcagaagttgcaacaagctgagatcacgccactgcactccagtctgggtgacagagcgagatgctgtttcaaaagaaaaatataggtcaggcacagtgtctcatgcatgtaatcccagcactctgtgaggctgaggtgggtaggtcacttgagatcaggagttcgagaccagcctgcccaacggggtaggagggaggaaggggaggcaggggcctgaatccaaaccagataagaagacccccagcaaaggggactgtggcactgagatggaaagccccttccctcccctcctgcaggaagtgagtgctgggagatgagggtctggcagagactctggagacacaggaatttcaaacatgcagccattctctcccctcaagatgtttgcagctgggtgtggtgtaatcccagcactttgggtggcctcacgcctataatcccaacactttgggtagccaaggtgggcaaatcacttgagtccaggagttcaagaccggcctggccaacatggtaaaacacagtctctactaaaaacacaaaaaattagccgggcaggtggcacacatctgtagtcccaactactcgggaggctgaggcacaagaatcgcttgaactcaaggggcggaggctgcagtgggccgagatcgcgccactgtactccagcctgggtaacagagcaaaactgtctcaaaaaaaaaaaaaaaagatgcttgcaaaagttttaaggtacatgggatacctacatatttaagctgtatgaggcatgaggaaaacaagaaacttctggacagactgtatctcccagcctttcagggccaatgagacaaagatttaaggaagactgtcacctcacaaagagctctaccaggctctcagatggcacccctaaggggttacactgtagaaaaagggaaggatcaacaatagacgaagtctcatcaaaatgcaactcggctctgaccagctacttgccacctggatggagatggacagctcaccaccaccacatttcccatggaggaaaggaaagccctctctggaagaaaacaccctgctggagtctctggcttgtgatacacaatgagcagcacaccacacacactcagcacgccagtaacaaggacagacagacagacggtccacggaaaacacattgcagctgcagacccacatatgctaacccataattagaaaaaaaatcaatcaattaaaactgatgcagaaataagcaggtgatatgagttagtatataagaacattaaaagttaatatgggtcgggtgcagtggctcacgcctataaccccaacacttttggaggctgaggcgggaggactgctcgaggccaggagttcaagatcaacctggccaacatagtgacaccctgtctctttatttttttattttttatttttttgagacggagtcttgctctgtcacccaggctggagtgcagtggcacaatcttggctcattgcaagctctgcctcccaggtttacaccattctcctgcctcagcctcccgagtagctggaactacaggcgcctgccaccatgcccggctaactttttgtagttttagtagagacggggtttcaccgtgttagccaggatggtctcgatctcctgaccttgtgatccgcccgcctcagcctccgaaagggctgggattacaggcgtgagccactgcgcccagctgacaccctgtctctttaaaaaaaaaaaaaaaaaggaaaaaagaaacaaagaaaaaagttgtttttttttttttttttgagacagagtctagctctgttccccaggctggagtgcagtggcacgatcttaatgcaagctccgcctcccaggttcacgccattctcctgcctcagcctcccgagtagctgggactacaggtgcctgctaccacgcccggcttattttttgtattttttttttttagtagagacggggtttcaccgtgttagccaagatggtctcaatctcctgaccttgtgatccgcccatctcggcctcccaaagtgctgggattacaggcatgagccgccgcgcccggccgaaaaaagttaatataactgtatcccctatgttcaaagagttaagtagaaacacaggaagcaattaacaacttaaacttctggaatgaaaactacaatgtctgagatgaacaatatgctggatgagattaactgcagatgagacactgtagaagtccagatcaacgaatgtgaagactaaaagaaattatccaaaatgaaacactgaagaagactgaaatgaaatgaacagagtatcagtaaactgcgggacaacttcaggcagccaaatacatgtgtaactggagcccccaaaggagcgggaaacaccaaaaagagaaaacattgagtagctgcaattggcaggattctaaaaaaggtcccgaaacatctcccacggtcttctcatctccacccctatccttgagacagggtctcgctctgtcacccaggcctgtagtgcagtggcacaatcatggctaactgcagccttgacctccccagactcaggtgatcctcctacctcagcctcctgagtagctgggactacagttcatgccaccacatctactttttgtagagacacagtctcgctatgttgcccaggctggtcttgaagttctggactcaagcaatcctcctgccttggcctcccaaaatgctgggattacaggcatgagccaccatgccaaggacccatcttctcatctttagaaactgagactgtctgtgttgcaatggtcggatttggtgttactgatctcaaagccagtgcatgtagctccacttctggtgagaagccctacgccatggaagcatgagtagcgaatatccagccccagaaacgtgacagaagcctttagtgacaagcagggttcaaccacagctgacaaacggctgctataggcagaatgcacccaaattagaaaggtccaagacaggttcacaccattctccatgtacagagttctttttcttaccatacttttaccttataaaacacatcaggcacgtactgctcactgctagactccttggcgtagccaagctccggggcgtccttgcatggcagcaaacactcatcacggaccagtgccatacactgattggacacctggtacccttcaaagtggacttggttgtcaggaccacctgcaagagagagacctttaaaaagagtctaccaaacggcattcaaaaccagtccatatctgttaactcttcacctctgatcaacagaaaaaacaaaccctcaagagtttgtcgggggtaagagttaaaaaatgttcagtagtcggccgggtgcggtggctcatgcctgtaatcccagcactttgggaggctgagacaggcggatcacgaggtcaggagatcgagaccatcccggataacacggtgaaaccccgtccctactaaaaataaaaaaattagctgggtgcggtggcgggcgcctgtagtcccagctactcaggaggctgaggcaggagaatggcgtgaatggcgtgaacccgggaggtggagcttgcagtgagccgagattgtgccgctgcactccagcctgggtgacagactccatctcaaaaaaaaaaaaaaaaattcagtagtcaacggatgggtggccacagcacaagacctagcacaagacctagcacagtcaggacaccctgcagctccgcacacacttggctccacaaacaggtgccactaaggacatgctctatgagaatctggaaatcaagactgttaaacttttgaaaaaaagaaaagaaaaggctcagattacgcctgtaatctgagcactctgagagggcagggcgggaggactgcttgagcccaggagtttgagaccagtctgggcaacatagtgagaccctatctttacaataaatcaatcaatcaaaaaaaaaaaaaaaagattgttaaacattgtctagcatctgcccctaaaaccaggcttagtgtcatcagcacttgggctcctggttcataataacaccaggggtgtaaacggcagatagatccctaggctcacggtaaggatgggaggataaattcatctggaggcagagagatggggaagcgggtgggagaagagcaagacggaaactatttttaatacaaatccagtcatggtattgtatacacagcagcctctgtcttccagaaacctacacggccgccacacagagttaatgccaccaggcgtcatcacacagtgtggaggtgcaggtgccactccacggccgtgggcagacctgggagcccagctcctccatggtttcaccctccacactgcccaccccatccttctctcccagtctccactccatcgaagcctccagaatgacttcatgtggggacaggagaactacagatcatggctgagaggcggcagtgtggtccagttagaccagatccctgaagtgagctgggcagatgatgccatgggggcagcctgagcctttggaggaggcaggcatgggggagatgcccaccgctgcagaagtgtgcttccagaactgaagttatgtgctgactacaatctcattattttttaggtatttatttattgttttagaagtaaggtcttactatgttacccaggctggtctctaactcctggccccatgtgatcctcctgcctcagcttcccaaagagctggaattacaggtgtgagccactgtgcccagccctcaacatttgttatagttttggatgaaaaaaaaccctcaatacctctatttcagtttctttgacaaaaagaatcacttatgatcagaaaacagaaacgtagtgcacatggctgtcaaacatgcatcagaaagcaaacctgacggccacacaatcaaaaaaggtgagggaggagatagagctggccgccatgaagctctcaacacacataggaggcaagtgatggctggcttcaaaaccctgggtcaaactcgctccaaaggcacagttcaccagcataggattttctccctgccccaaactcaaatgctcaggaggcagccaaccctgcacaaatgaccactaatatctcagcaaagatacaggcacctcacttgcccatgtgcttggtggcataaatgacactgaaagaatgcagggctcagagggagcagaggcaaaggctggacagagcgccggggagccacggtgcagacatctggttaggacaccatgaaaacctggactgggcttggcgcagtggttcacgcctgtaattccagcactttgggaggccgaggcaggcagatcacctgaggtcaggagttcaagaccagcctggaaaacatggtgaaaccctgtctctactaaaaatataaaaattaactgggcatggtggcgtgcacctgtaatcccagctactcaggaggcagaggcaggagaatcgcttgaccccaggtagcagaggctgcgatgagctgagatcataccactgcactccagcccgggcaatggagcaagactccatctctggagtaaaacagaaaaaaaaaaaaaaaaaaaaaaaaacctgctctggtgtttagactggtcattaacacgataggtcattcaagaaagaaaaatctagcagttgagaataagagaaaaatggaaagcagttatttataaaactgaaggctgtttataaacagcaaaattggccatatggataatcttcaagggtaaattcactgagatgaactgcaaactcccctttccacatgcagcagcaggacatacatgtcctgatgggtttgtgtaaccctgccggaatggctggcaggacaagttaactatcattcccttcacaaatcagtcagtcaggaaatccctacgtgggaaggatcacagggcctacaaagaggcagtgacagcaaaacttcagctgctattgaatctgaatgcatttctggttttttaaccagatccccagcaagtaattttaacagcccgtaaatgtagagtatgctagactatgaggacacagatgcccagcccagtgtgtggggtaagttctacactgcactgtccttccacagggaccctcagggtcactcgagcaaagcgcacacttcattggggctcttatactctgaagcctcatgccagagaatacctgagtacaacgaaaggggaaaggggaggaaggacagatgcagagggagaggcgaggcctccgcatcccagccaggacctgagtgctgtcggcaggggcgccccgcaccctatgccacatggctcagtctgaaccttcctgtctaaggagggatgtgggacgggaatgcaacaagtacaatttccaacagcgctatggggtccccgcatggccgtgaccaagaaaccctaacacaggggaaagagcacactttacttgagttagaaaaccttcatccgagctgtagtgattaaaagcacgcatgaggataagcactcctcagtcggccaccaccctcgggaaagggagaccatggcaagtctgagcaccaagaggggtgattcacacagacacaaaggggctgtcactgcctatctgcttataaattaggttatttattatctctcagttctaaaacctttcagtaaataccaattccagaggtgaaaaaagcccaaggatgatctatataatctctcaactctcaacaagaggtatgactcaaattcaaggtggtagcccccaagttagaaactgtaattctaaaaatgtgccagttcttctggcccatggaataatttctccacagacacagtaattagactgggcacagtggctcacacctgtaatcccaggactttttgaggccgagacaggcggatcacttgaggccagaagctcgagaccagcctggccaacatggtgaaaccccgtctctacaaaaaatacaaaaattggccgggtgtgttggcatgcgcctgtaatcccagctacttgggagactgaggcacaagaatcatttgaacccggaggcagaagttgcagtgagccaagattgtgccatggcactccagcctgggtgacagaacaagactgtctcaaaaaaaattaaaaataaaaataaaagatcctcgatttcactcagaataaaatagtcattaaaaccacactgaaatactgtggaactgttccatatcccacaagactctgaatgcccgctacacacttgtgtaggcaaaaaccactacttacaatgatatgagattagaagcaattctgttttataaatagccacaaaacagacaggcacagttgtaatgcacactgaattctctgggactacaatagtgtaagctgaggcaagggcacactcttctgcttggaactgggtggggagctgctgagcctctcaggaagccatgttgctgacggcaaggccagctgagaggcctggacccagccctgtgctcagcccttgcccacacaggccagtacggatcctgctgtgctgtcctcacgagtcagtccagaagcactgacacacctaaacgtatgactttattctgtttctttcctatcactttcccctgatgttacagttaggatactactctgccttccatttcagaattctgtgtgtcggcagcctacattaactatgttacccatgaattttatttctgcatagtaaaggggtatcacaaagtgttctaaaaacaggagttgagtctgataggcttggaaactaccagcctacactactgtacccagatatcagcctacatgtggcaggggtgtggggatgtgacaccgagaagagtatgacgacacttttctccccgtctctaaatacaacgctggccaggcagaattctaaatgacatgagcgcctttgttctctgctcccctcctgggtgcccagtgcccactgcctgatgccccagctgctctccagctaccctgagtcccccacgacagcacccttcccagggtgccctaacaggttctgtaatgcagaattcccagaccctccttcaatcctagcccaaattcccaacccttcccttaagcactcaacccaagcaacaacttaggaaaataaatctgactcggccgggcgcagtggctcacgcctgtaatcccagcaccttggaaggccgaggcgggcggatcacgaggtcaggagatcgagaccatcctggctaacacggtgaaaccccgtctctactaaaaatacaaaaaaaattagccgggcatggtagcgggcacctgtagtcccagctactcgggaggctgaggcaggaaaatggcgtgaacccgggaggtggagcttgcagtgagccaagacagcgccactgcagtccagcctgggcgaaagagcgagactccgtctcaaaaaaaaaaaaaaaaaaaaaaaaaaaaaactgactcaactaattcacttgtaaaatagttaacatgtattaattattaacataattaacgtgtgaaagatgcctatcaccctcaaaaagtatattcatttcaaaaatcaatctaaatgcaccttaaatcaaggaactgcaggctgggcaacacagcaagacttcatttctactaaaaatttaaaaattaggccaggcgcagtggctcacgcctgtcatcccagcacttgggaggccgaggtgggcggatcacgaggtcaggagatcgagaccatcctggctagcatggtgaaaccccatctctactaaaaatacaaaaaattagccgggtatgctggcaggctcctatagtcccagctactcgggaggctgaggcaggagaattgcgtgaacccgggaggtggaacctgcagggagccgagatcgcgccactgcactccaacctgggcgagagcgagactccgtctctagggaaaaaaaaaaaattaaaaattaactgggcgtggtggcgcacgcgtgtagtcccaactacataggaggctgttggggtcggatcacatgagcccaggagtcgcaccagtgagctatgactgcaccactgtgctccagcctgggtgacagagcaagaacatgtctcaaaacaaacgaacaaacaaaaaaaaaaacacaaaaacccggcaaactcaagaatatgcagcaaagtgcaaaaacttcgcagtcagcttgaacacttttctttctttttttccaaatgttttatttatttatttttgtagagatggggacttgccatgttgcccaggctggtctcaaactcccagtctcaagggatcctcctggctcaacctcccaaaatgctatgattacagatgttgtaatcccagcactttgagaggccaatgagggtgactcacctgaggtcagttcaagattagcctggccaacaaggcaaaacccagtcgctactaaaaatacaaaaattagccaggcgtggtggtgtgcacttacaattccagctactctgaaggctggggcacaaaaatcgcttgaacccaggaggcggacgttgcagtgagccgagattgcgccactgcactccagcctaaatgacagtaagactgtcaaaaaaaaaaaaaaaacccgttttgctttttttttttgagatggagtttcactctgtcgcccaggggaacatccttgtccatatatacatatacatatatatatatattttttttttcttttcttttctttttttgagacagaggctcaccctgtcacccaggctggagtgcactggcacaaactcagctcactgcaacctccgcctgatgggttcaagtgattctcctgcctcagctccttgagtagctgggattacaggcgcccaccaccatgcccagctaatttttatatttataaagagatggggtttcgctatgttggccaggctgatctcgaactcctgacctcaagcgatccactcacctgggcctcccaaagtgctgggattacaggcgtgagccaccacgcccggccaaaaaagtggacttttaatgagagcactggcctagaggagagctctgtggaggtcctgattctgttatgagttttggggtttgtgtttatatagttttatgctgttaagttgttcagaatttttaccataaaaagaaaggaggaatttatatcccacaagcccagtaagaaagtccagtataactaagttaaggataaaaagctaccaaaaagaggaacaaaatatattaacgaggtggtaatatttacagtacatactgtccctgttatacctgtagccactgcagtaacaaacttggatccaaaatgtccgtctggagagagccggcacatgttgggatgcttgttctggaagtctcctgcagtgatgcactcttctgaacttaggaaataggtgtcctaagacaagagaagcagcctatcaaattttacagcatcatgccaaaatatacttctatttcttctttaaaaaataagaactaagccaggagcagtgactcacacctctaattccagcactttgagaggtggaggcgggaggtccacttgaggacaagagttcgagaccagcctggccaacacaccaaaacctggtctctactaaaaataaaaaaattatctgggtatggtggtgcacacctgaacccaggaggaggaagctgtagtgagccgagattgtgccattgcactccaacctgtgcaacacagcaagactctgtctcaaaaaaataaaaataaaaaataagaaccaaactataaaactcaaaaccactttgaaacaagtatctacaattcctaaccattaccaattcctcatctaaaaccactcacgactagaaaggccagaagcactatgcaaaccaccccgccatgggctgagccctgaaaatcactgctttataaaggtaagatgggtttagctctatgagaccaagagatccggccttcattgatcaagaagaacttcttgaaaaataatggggcctgagggctgggcatggtggctcacacctgtaatcccagcactctgggaggccaaggcaggcagatcacaaggtcgagatcaagaccatcctggctaacacagtgaaaccccatctctattaaaaatacaaaaaaattagctgggcatggtggcaggcgcctgtagtcccagcttctcctgaggctgaggcaggagaatggcgtgaacccgggaggcattgctagcggtgagcagagattgcgccactgcactccagcctgggcaaaagagcaagactccgtctcaaaaaatacaaataaataaataatggggcctgaaagctagaaccagcggtgcaaagagaccctgataatgcaggccaacaccatctgtaaccaagccatagggccacacgcacagtcctgtctccacctcaccttatttcgactgtagcggacggtaccctttcgggtatcttctgagacgaggtctgtaaatatccagccaaccttaaaaaaaggaaagtagcttttaaacatctcctcaagatagacgatgaatggctgggcgcagtgactcacgcctataatcacagcactttgagaggccgaggcaggagaatcacgaggttaagagatcgagaccatcctggccaatacagtgaaaccccatctctactaaaaatacagaaattaggccgggtgcggtggctcacgcctgtaatcccagcactttgggaggccgaggcgggtggatcacccgaggtcgggagttcgagaccagcctgaccaacatggagaaaccctgtctctactaaaaatacaaaattagttggggtggtggcgcatgcctgtaatcccagctactcaggaggctgaggcaggagaatcacttgaacccgggaggcagaggttgcagtgtgccaggatcgcgccattgcactccagcctgggcaacaagaatgaaactccatctcaaaaaaaaaaaaaaaaaattagctgggcgtggccgggtgtggtggctcacgcctgtaattccaacacttcgggaggccaagacggtggatcacgaggtcaggagatcaagaccatcctggctaacatggtgaaatcccgtctctactaaaaatagaaaaaaattagccgggcgtggtggcgggtgcctgtagtcccagctactcaggaggctgaggcaggagaatggtgtgaacccgggaggtgaagcttgcagtgagccgagattgcgtcactgcactccagcctggcccacagagcaagactctgtctcaaaaaaaaaaaaaaaaaaaaagatagatgatgaatgttttctggcttctgcccagagagcttaaaaagaatgttctcagtcagaaactcctttttgtgagccaggtgaatctacatcaacaggttcctcaagtaagatgccaggccacacccagggatctccatctctgttcagtagaaactggccaccctccctctggtgctgctgggttagagatgagtttcctcagcaccagctctgcccagcaccatgctgggtgcaagagacacagcagtgagtgagaccaacagaaggtgagtgaaaaaggcacttaaactcccaagaggaagacagacaacaagcaagcaaataaacatttcagagagtaggtctttcctgacaagctaagaaaaaggattcctagagaaaggcacataatacaaaaggggtaatataatgcagacttcacacagctgctcctgggagctccacctcaaggccggaaggaagcatctgagggtatgaggatctgaaacctgtgacccagcaacccctgcacgttcagtgtagcagtgcctgtgtgctgtgtgatccttaggcccgcctctgcctgtgaattcctgcaccagaagcccgtcacgaggccacaggagcagcagttgagtcccggcaattgtcacttctgtcctcgggaaggatctgcggcccatgaccctctccagcactacctgacacacaactcttcccatccacccccagcagacatgactagcccactgggagactttcactgtctttaaagatgccccaatgaatgaaaaacccaaggtggtggcaacagagaaaatgaaacttaaagggttaattatgcagtaaataaagcaaaatcaaaatcaaactgagaaaaattagggcttagaaactcatattttaggccaggcacggtggctcacgcccataatcccagaactttgggagaccaaggcgggtggatcacctgaggtcgagagttcaagaccagcctggccaacatggtgaaacatcgtctctattaaaaatacaaaaattaactgggcgttgtggcgggtgcctgtaatcccagctacttgggaggctgaggcaggagaatcacttgaacccgggaggcagaggttgcagtgagccaagatcgtgccactgcactccagcctgggtgaaagagcaagactcctcaaaaaaaaaaaataaaataaaataaaaagagaaacttgtgtcttgcagaaaattatttaagtaatttcaagattatgaactgtaagattataacaaattaggtcaaaaaattggaccaatctcttttaaacaagagaacttccagaatttgaacccaaatatgcccctaaatcaagatgctgactccttgttagaaacaggatgtttctttcctaaagacagtaaaactgtgtggactgctcactgacactactaggttttaagtcacatttgcagtctcacccgcttcatctgtagagaagattaaataatctagagattatttttcatggtctgagttgattaggaaataaaggataaaacatacttattaacattaaactcgtaagatatgttcaaattcatggctctacattaatttattaaaattgttcctgggaactgtatcaatgtcagataaaccagatcaatagaataaaaaaggaaatccttttctcatcttctaactgttccatgaaactaggaagaattgtaggctcagagagctaaattataaacaggaaattaaatgatgattgatgacggagcagcagaagctccaagtgcatggcacagaacatgaacactgtcaatggaatgtcagccttgactgtcctcggcttccaagctacatgaagggagagctcaggcagaagggacacacatgcacagaggagccagcaggggtgcggctggggtctgtttcccacttgaagcagtcctcatgaagtgtggctggaaggctgaaatataacagccagatctgcactgggatttttttttttttatgctcaagaaaatgttctcattttagtttaagtcagaggaacataaaggttattggtgcccaacaaacatatgtgaagtttcaaaacatatagtgcctgcacctgaccttgtgcagccggagagagccagtacccgacacagcccggccactctcccaactccccctggcctggatgcccaacagagcctggccacgccccctgcttggctgccggatgcctcagtaccttccgcaggccaagtttggcagcaatttcatcgaccacttcagcttttggatcctcaagaagctccaagctgttctgtgtaccaatctgcagggaatcaaagggagaagatggacttagagcagagggctcaggaagcagcaccccaagcccttccacttccagctctaggtcacaaggagtgctgggggcctccttgtcagaaaggagaactatagccacagataaaacacatgcgacacgcctcccggcttctctccttctcgggttgtgctgcaccttttaccagggctgcaaaacatgtggcatgcagggcccagctgatgtgtgctgcacagctctgcatcaggagcactcaggactaaggcaaggcaaggtctacacactctgcctgttttaaaagttccttcatcagggaattaagttactttcaaacttccttggataagtagcttcactccaaacaggtttggctaaattaggcaagactcaaactgtaaggtaacatccattcccacaaaacagccttggaaaatctgtgtgccactcctgcagagacaatgcttggcttcacagctaagatactcagttacagggacactatgaactccacagagagcgatgagctcaccaaccctaaggaagggaaaaggtgttcaaaaatcaaccacctcctttcatctggcacagggcagtcgatgagttgtagcttcgactggctcccatgcaactgaaaccaaccacagcacatcacttcccagagtggaccaagcttaccgaaatcattaatgttcacttaaatgtagcttgcgggtcattcaaaggtatcattctatgcagaaaccccagccataagaataggaaaggtaaaggtaatctcaaattgagttacagtaactgggcatatccttgtaaattagtgaaaatctggcaaaccacaaagaagtttacgtttgctgggtattacccatatggaggtcattaatacctccagaacgtaggttaaatcacaaactcagagaaaaagctaaggaaaaggagttgtttaatgacatgtggcagcataagctgcataagcaaatttttgtgtgtgtatttttagtagaaacggggttttgccatgtcagccaggctagtcttgaactcctggcctcaagtgatctgccttgcccctacaaagtgctgggattatagatgtgagccaccacggctggcctcaattatacttttaatagaaccgttgagctctccatgaaagagaccctttaaaaaaactgaatctgaatactgtgtgcttcgaaaagcagcatcctgagtacagcacagtgacctaagggttgagacttcactggcggggtctctactgccatctagtgtctctttttaaaagaaccatggcaaaggcctcatgaaacactacatctattgctatacaaagataccaaaaatgtcactgaaaatccgtataaatacagccaagaaagacacacatttgtgcaggggccactagcaagcctgtacaccagctgttacccatgcatagcctgcagtttcagactctgatcagcaaactctgaaagcagctgcagggcaccccagcctgcctcccaggcaggttatctaaataggaggctagccatccggtgatctccacaagacagtgttaggtggaaaaagtgcacatattatacgtacaaagaaacaaagaagggggatagtatgaatgtgcgtgcatgcatgcgtgtgtgtatgtgcttacactaaaaatgtcacatacaaaaaaaacaaaactagccaggctcagtggcatacaccgatagtcccagctacttgggagaaagaggtaagaggatctcgctcaggagcgagaccttgtttcaaaacaaaacaaaacaaacaaacaaacaaacaaaaaacaaacttttgccaagcacaatggcttatgctggtaattctagtactttaggaggccaaggcagtaggatcacttgaggccaggagtttgagaccagcgtgggccacacagagaccctccctgtataaaaaaaaaaattaaacaattaaacaattaaaaaaaaatcaggccgggcgcagtggctcacgcctataatcccaacactttgtgaggctgaggcgggtggatcacgaggtcaggagtttgagaccagcctgaccaacatggtgaaaccctgtctctactaaaattacaaaaattagccaggcgtggtggcggcacctgtaatccccgctattcaggaggctgaggcaggagaatcacttgaacccggaaggcggaggttgaagtgagtggagatcatgccactgcactccagcctgggtgacagagtaaaactccgtctcaaaattaaaaaaaaaaaaaaaaatcaaacttcaggaagtccaactaaaaagatttaggctgagcatggtggcttatgcttgtaatcccagaattttggtaggctgaggcgagtgaactgtgtgagcccaggagttccagacaagcctgggtaacatggcgagatctgtctccacacacactatatatgtatatacacatacatacatatatatgtatatatacacacacacatatatatatacacacacatatatatacacacatatatatacacaaatacacacacacacacacacacacacacacacacacatataaaagtcagacatggtggtgcacgcctgtagtcccagacacttgggaggctgaggcaggaggattgcttgagcccaagagggctgcaattgaggctgcattgagccatgatggcagtactgcactccagcctgagcaacagagtgagacgctgtctcaaaaagaaaaaggttttaaattctaggggctacctataaaggaaagcagggtaaaaggaaatgaatataccttgtttgtaaacatgactttggaaatgtgcactttttttttcttttctaacttttaaaaatatttctggctgggcacagtggctcctacctgtaatctcaacacttcaggaggccaagatgtgagggtcacttgaggccagtagttcaagaccaacctgggcaatatagcgagaccctgactctaccaaaaatttaaaaactagcttggcatggtggcatgcacctgtagtcccagctactcagaaggctgaggcaggaggatcgcttgagcccaggaggtcaaggatgcagtaagctatgactgcacaactgcactccagtctgggcaacagagcaagactcatctctaaaaaataaataaataaaaattaaaaatttctaacatacagctaatttaaagaattttacagtgaatactcatatacccaccactagattcaccatgaacatttcctatgcactatctgtccctctagtcacccatcaattcattttatttttctattggatttcaagtgtattacagacataaatgtacttctccctaaatagtacagcatgcatatcattaactagcattcaatatttgcttacttttttacttttgcaataaaatgtatgtaaaatacactacatcattatacataattacaaaacaaattgaaatttatataaatatacacacacagcccaattcccaaaaaccagaaatacaatgtgtaactagttggtggcataatcataccgagagggccttccaatgacttccaagcacagtgactagatgtgcacacaccctgcgggatataccctcaggacacttctttcccctccaaacaaatcttaaattgttatcagtcctattttggtggcagtttttgttactctggtgacactctggtgattggtgctgaggtgtgtctgtggccttctccatggttcctaagacagtgactgctgcatggtggaagagacacagaatgacacaaggactgagcacctggacactacagagtcaatgagcaaacctggacacagcagacgagataaaaacactggatcaatagtggcaaatgtaccggttgtgtaagaaaatatccttatccttagtaacatacactgaaggttttaggagccatgatctcactctccaataactcagaaaatgttgtgcacgtgcaccggtgtgtgacaaagggggaacaaacaacaaagcgaacagggcaaggcctctccgaaagggcgtcccccacagcctccaaacacagaaactcaggaacttgaatcccgtcatgtttacctgaggtggctcataaatcgcagccacttcagccctgatgccaaggggaatgtctttgtgctccgtgtaccgtccgtataagtacccaaaatgctggttccctgtctttctccagaagtcaagaaagcggtcagcgacggtgtgattctcaaacatgatattgtccacatgcctgtacttctgtagagttaacaagagtgggctgatgaaaacatgccatcaaaaagaaatcacttgtttttctaacacaaaccattcataaatatcttttacctagttctttaaaaaacaaaccaatagggtgtgatggtgcatgcctgtggtcccagatactcaggaggccgaggctagaggatcgcttaagcccaggagttcaagtccagcctgggtgacagagtgagaccccttgtatcttaaaaaataaacatctgggctgggcgcagtggctcacgcctgtaatcccagcactttgggaggccaaggcgggcggatcatgaggtcaggagatcaagaccatcctgaccaacatgatgaaatcccgtctctattttttttgtattttataaaaatacaaaaaattagccagagccaggcgtggtggcgggcgcctgtagtctcagttactcgggaggctgaggcaggagaatggcgtgaacccgggaggtggagctcgcagtgagctgagatggcgccactgcactccagcctgggcgacagagcaaaactccatctcaaaaaaaaaaaataaataataataataataatctgctattctatttaaaaataaaaacaataaacattacttaagaaaaaaaccagtcaggcacggtggctcatgcctgtaatcccagcactatgggaggtgaggcaggcggatctcttgagtccaggagttaaacctcaaaaattattcaatacagtgaaaccctgtctctactaaaaatacaaaaattagccaggcatggtggctcatgcctgtaatcccagctactccggaggctgaggcaatagaatcacttgcacctgggaggctgaggttgcagtgagccaagactgcaccactgcaattcagcctgggctacggagtgagactctgtctcaaaaaaaaaaaaaaatgctctgccctttagaccacttcagagtccagtggcgggacacggggttataggaggatggagatgggtttcatctatcaataaattcaaaataattccattgtgatttaacctaaaatacaggttttcacaatctctagggcaaaaaacaaacacattttctttttttttttttttgagacggagtctcgctctgtcacccaggctggagtgcagtggcgtgattttggctcactgcaacctctgccttcaggttcaagtgattctcctgcctcagcctcctgagcaactgggacgacaggcgcccatcactacgcccagctaattttttgtatttttagtagagatggggtttcaccatattggccaggctggtcttgaactcctgacctcaggtgatccgcccacctcaacctcccaaagtgctgggattacaggtgtgagccaccttgcccggccaaaataaagtagttttcaagaagaaaaaaggaatagagaataggaggtttccaaaaaagtcgaggaggccacggaattctctctaaggagccgttttctctaagggcacagcggcaggaggaaggcgaggcaggctactcagaggcgggacaaggacagcagaacatccagaaaggccggaacgctccctccttcctgagccacattctctccttaagccagcctggacaggtgctcagagctggtccaaggggtgcccctttaccaaccttcagagccagtttcctcacaaccactgaggattttaaataatcatcaggaacattctgcctccatatgagccagcaaaacagagaactgagggcgcgcactccatatctccaagagcaagaagccttaaaaatgatatattcagtgtaccacttccacaaaaggatcattcagtccatcaaaaagtactgaaaatccaccacgcatagtgctaatagcattccactccaaggggctcttctggaaatatccgtttctcagccatgaaaacaaatctagacagacagggaacatctcacctgtctgttcagcgtgatggcgctcggctggcacttagtacagatgccattcggccacgggaggtgcccctcgcaccctgacttaatcttgcagctgatgttctccagggcaacaaacttccccctacatagaagagaagcaacttaaacatcacattggtgaaaagttgagcaagaggctggaaatgacatgctaagtatcttatacctcctgaacagtgtctcaggagctaagcacgtggcagcagcagggaagatgggctaaggatgattctaatggaagctctacctacagttccagcacattccgaatcccagcttctgtcccacatacttcaaccatacaggaacacacaactactttcctaccaaactgtggtgttttttaccatctatcactaacatccgagaaagctttcaagaatactgtagaatatctactgatctcacctgtgccactgagcgggcatgaggctcctacaggtttcattaaattgtcagaaactttgacattagcccagtacttagatatttgtaaaaaattcttattcatgggaaaaatctgattaggatatataattaaggcatctttactctgctttaggctaaaataaaaactactgttgaagactgtcaatgagaaaatcctggaccctactctgaactttttctttttctccagctttattgaaatataactgacaaaaaaaaaaaaaaaagaaatctgtatctttaaggtagacgtgaggttttgtttttcaaataaaaacgatatatttacagtgtacgaaatgatattctgaaacatgtccacactgtggaacggctaaattgagctaattaacatatgcattacctcacatactgatcatttttggtggtgagccatttttggtatcatagcatctaggaagcaaagactcgtcactgaatctgcatgctaacagcagccacaaacacgcccccactagagactgtgttccttgacctagactgagaaaggctgaccaagtctctttcactacaatcaatctgcacccactccttagtccagagagttccacagctttccccactgacaagcaacagtgggtttctagcaggttttttcttctggtctaacatttttaaaaagtcattttaggatgtcagcaggttgtcagagaaaagctacaatcaggcgaatatgacatccttcacaaaatgttgctgacttcagttcagccaccatctcctcgttgcactgacaggaattataaaataatagctgaagcctgctactttctggtagggtgtacagagagccaacaggagaaggtcatacaggcaagggcttgccatggcttaaaagaaatcaaaatgctcagttcacccctttctggccactgttaccacctctgcccacctggctgagcctgtgggcaactactgtggtaccatgaggattagtggctgcagcccctgctgtggctgaaaaccaagctgactcagaggccaggctctggggaaagggttaccaggcactgaggtggggaagctgagattctcacagggtagttgtttttctgaaaagcagagaatgaactcagaccacagaatcaacaggccaccatcacagatgctaacttgctggggtggtgtgtgtggggacagcctctgtctgatactgcactgtggccacgcagccaggcgcctgcacagtcgctctgccttgctagctcccttctagaaccaggttggccaggcgaggtggctcacacctgtaatccagcactttggggaaaccaaggcaggaggatcacttgagccaaggagttctagaccagcctgggcaacatagtgagaccccatctcttaaaaacatatatgagtacataaaaaataaataaataaatatagaaccacggtaactttcaaaggcgtgtgaccccttctcatctttacttctctcattcacacgttcactggctataagcaacaactgccagctacacaaaaaggaatttacgcacaaccaggttacagcaagttgcttacttgtcagcccctccagtcagcttccggatgtaggcgtggaaggacatgtgcttcacgggaggctcgagatggtttagatagtcctcatcgaatggctgccaagacacagagtaagcgagtgcagtctcacacgtgccggtcactccaggcgctgagcctctgctacgcacagggggaggccagcagcatggccttggcaagtcaaggcccacagtgaaagcaggtactagggtctcccttaccactctgagtcagaaccaagtttttctttttttaattaattgttttttgtttgtttgttttgagacggagtctcactctgtcgcccaggctggagtgcagtggcacagtggcacagtctctgctcactacaacctccacctctgggttcaagcaactcttctgcctctgcctcccaagtagctaggactacaggtgcacgccaccacgcccagcttatttttgtatttttagtggagacggggtttcagcatattggccaggctggtctcaaactcctgacctcatgatccacccgccttggcctcccaaagtgttagctttacaggcgtgagccactgagtctggccaatttaactgttttagagatggggtctcatgctgttgcccaggttggagtatggtggtgcaatcatggctcactgcagcctcgacctcaagtgattctcttgcctcagcttcctgagtagctgggactacaggcgtgaaccaccacacccagctaattttttaaattttttgtagagacagggtatacaaaaaaagagttgcccaggctgaacaattcctaggctcaaatgatcctctggccctggcctcccaaagtgtcgggactacaggcgtcactgcacatagccagaagcaagtttttctttgtgtgccagttatcttttcaagattaaaatgaatctctattaaacacaaaacgctctaagtcaaatgagtttcaggaaaattgtgcaaaaagaaatgccacaagatgaggcaagagatgcctcatgaagaaaatcgggctggccttcctgctgtaaacccagcattaacagttccagtcggcattattacggtaactctcagtctcaccaggacaaaccagtagaagagatgtgagattcaaggcaaagtaaatcaacaatgataagcacggaggccgacaggctcagctttgtgtcagatcggaaaaggattgtccagggagcccgctgtaaatgctgcccctttatcacagccacacaaatgcttcagccattcataatccagcgagaaggtcactcccataaataaaggctcgtcctgtgtgcagcttgcactaggggaatatgaggcccagggcaataaataggtaagttctttgaaccactcactacagccaagtgcgtggactcagggcaagcacttaagacagctgtctacccgcagccccccacactggcccagaacttactccgcagagactctcacctctagagggacgcagtgcacgcatttccccaaagggccgtggcggcatctgaggagagtacaaggcagaaaaaggcagagcagtgaggatgtctgtgttccgctgctgctgtctcacatgcacgtcctactttaacagagtgtttccctgcccacgtggagttatattccagatggcacatggataaacatttatattttaattgttgttttgttttgtttaaagacaggctctcactctatcgcccaggctggagtgcagtggtgatcgtggctccctgcagccttcacctcctgggctcaagcactcccacctcagcctccccgagtatctgggactccaggtgtacaccaccacacccagaagtttactacttatgttgatatgaattagaaaaaactgacccgcacatcaaacctgtgacttcatgggtatccactgcttaaaatgacacaaaccaggccgggcgcggtggctcacgcctgtaatcccagcactttgggaggccgaggcgggtggatcatgaggtcaggagatcgagaccatcctggctaacaaggtgaaaccccgtctctactaaaaatacaaaaaattagccgggcgcggtggcgggcgcctgtagtcccagctactcgggaggctgaggcaggagaatggcgtgaacccgggaagcggagcttgcagtgagccgagattgcgccactgcagtccgcagtccggcctgggcgacagagcgagactccgtctcaaaaaaaaaaaaaaaaaaaaaaatgacacaaaccaaagataaaagtgaatgaactcaaagtcaatgtaagtagtttattggccaaaggcagtggctcacacctctaatcccaacactttgggaggctgagatgggtggatcacctgaggtcaggagttaaagacaagcctggccaacatggtgaaaccccatctctactaaaaatacaaaaattagccggacgtggtggcaagcacctgtaatgccaggaaccagggaggctgaggcaggagaattgcttgaacctgggaggcaaaggttgcgatgagctgagattgtgccactgcactccagcctgggagacgagagtgaaattccactcaaataaataaataaataaaatagttttttttttgttttctttttttctgagacggagtttcactctgtcacccaggctggagtgcagaggtatgatctcggctccatgcaacctccgcctcctcgtttcaagcgattctcctgtctcagcctcccaagtagctgggactacaggtgcacaccaccatgcctggctaatttttgtatttttagtagagacgggatttcaccatattggtcaggctggtctcaaactcctgacctcaggtgatccacctgcctcagcctcccaaagtgctgggattacaggtgtgagcaactgcgcctggccaagtccatttaaagaaaagtgttaaataggccaggtgtggtggcttgcgccctgtaatcccagcactttgggaggccgaggcgggtggatcacaagtcaggagatagagaccatcctggcaaacacggtgaaaccccgtctttactaaaaatacaaaaaaattagccaggcgtggtggcgggcgcctgtagtcccagctacttgggaggctgaggcaggagaatggcgtgaaccggggggacgcagctggcagtgagcggacgtcgcgccactgcactccagcctgggtgacagagcgagagtccatctcaaaaaaaaaaaaaaaaagaaaagtgttaaataaataataacaaagctggtacgtgaacatggcaaagggcctgagagcggtgcataaataatccaagtttggaaaatacctacttcatatgcattttgggaaataacaacaatgaaaaaaccttgtcccacggctttctaacattttcagtcacagaagccttgggagcacaacacgcacaatctgaaggagaggtatgctggtttacgagggcgccggcggccgtccctccggggctcagtcagacccctttctaagtggggtcagaattcttacatgcgtatgagccctgtgctgcggaacagaggtggcctctgtgcttcctaataggcaggatctaagtgatgatggctcagaattctctcacacacacacgctctcaaaagctgctaatgaagccatgaagacacagatcatgcaagcaagccagtgccaggcccctgggaggagacacaaatggaagaggcatgccggctaatggctatggctacaaagtggctccatgccaatggcaggagagcaccatttatggctctctgatctaagacataaaagttgctaatgcagcatttggaatcccaataccgcaaagtcagcaccccgtcacatctacagagtgatgcattttaaaaaagaccccactgcagagacaaccttcgctcagacaatttcacatggccaagtataaactcagatccttctcactggtttatttaaaaggaattgcaaaaaatctaaaataaacaatgtacatatgcataagcacttcatatagccccaggtgaggagggaatattccaaggcacagcatcttctgcaagtgaaatgcttgctgcagggatggagagcgcacactagtgtggcaggtcaaaatcatccaaccgctatgaaatgagagacacagcactcacctcacatggatgcgcacacacaaccacctgccccttccctcctccctcccctgcagctgctgattaacaccccactctgcacgggaatcagcatctccaggggacatcacagtaaagacttggtgtgaggcccccaactcccccaatacctttccagtctctttgtacccaaatgcttcaaaattttttatgggaacatattttgaggtggaaactgataaaaagctaaaaaaaaaaaacaaaaaccgataaaaagctaacaagataacttgaagtttaatctgaagatagtaaaacttaagacttaacatttcttcatcagatacttattaaaacaagacatgttataaatatttccctttattcacccattaagatcaccacaagtaggaccctggaatctcatggatcacttacagctgtgggtctcggcttctgtaaatcttcccgtcctgtttgctgaggtactgatcaatctcatcctccaccacgttgggagcgccaaagactttgaagcccggtggaactgacgtctccatttcagatgagggcccagcaaggctcgagggaaacaggaacaacaaatcgccatgcctgttcaaatgataaacagaggctgatgccttcccttaccacctgagcttcatggaagcccaacttggatatctgcaaaaagcaaatgccaaccacccctgtaggcctaaacaatgaggtttctaacttttaagatgagaattctcttctaacatctcccctatgtttcctggcattataaagaccagtatgcaggttctctgtaatttaatctcttacaactttaccttaaactctgtgaagcctccatacacccaaatgattttgcttgcacacacagccacaatggacctgctgggtttcagggcctctcctcccgcctctcaccctctgcttggcccccacctccctcagccattcctctggcctctgggaggctctctcctcccccaacactgcatgtgctggttgcatgtatctccactgctttctcggcgttcacatacacacgtaagcacagacacgcataggagctgtcactgcttttaaaaagtgtgactggccaggctcggtggctcatgcctgtaatcccagcactttgggaggctgaggcagatggatcacaaggtcaaaagatcaagaccatcctggccaacagggtgaaatctcgtctctattaaaaatacaaaaagactagctgggcgtggtggcgcacgcctgtagtcccagctactcgggaggctgaggcaggagaatcacttgaacccaggaggcggaggttacagtgagccaagatcacaccactgcactccagcctggtgacagagggaggctccatctcaaaaaaaaaaaaaaaaaaaaagtgggattaccagagacatacttttctatttcaacaacccctcataaaatcctccaaatataaggagtccacgtctaattgctatgacaatggctgcctcaattccccagtgaggctgcttaaccaccccctcagccactcctcccacaatgacaagtatgcacaccatctgccagcttctgccatcatcaccaccccccaaaaaggcccacggacagacgtccctgtggttttccttctaaagggcaaactcccaggagtcagacttaagggtttctgcttgtctctgaagctactgacgtactgctttccaaaaaggttgccacaagtcacatctggttttctatcactttcagtctgaagtgtgttcttcccttggtcagagtcacgctgccaacttggtgccaggtttgactggcatggcaaactgctgacctcagaggctaacaagcatctccactcacagtccacagaagccgcctggggtcccaagtgaccagagatggctgccaacactaaccctccaggccagccttggaagaaaggctgcagcatgtcctctgacagatatctaactgctgccaacaagacacacacacaggggacagtctgagagggcaggatccacagctctaaaccaacacggtgaaggaagagcagaggccaaagtgcaggccctcaaggacacacagacactggggctcaggtgcagctcttcaactaatttctttcctcctcctcttcctccctaatttgggggtgatgaacattaccaaacattaccacatcagagacgtctgtttctttttttttttttttttgagacagagtcttgctctgtcacccaggctggagtgcagtggcgtgatcttggctcactggaacctgcatctcacgggtttaagcgattctcctgcctcagcctcccaagtagctgggattacagacatgtgccaccacgcccagatactttttgtatttttaatagagacggggtttctccatgttggacaggctggtctcgaactcctgacctcaggtgatccacctgcctcggcctcccaaagtgctaggattacagtcgtgagccaccacgtccagccgagacgtctgtttctaatagcagattacatattcctaaacaccatctaactactaatataaaaaacttgacttacacacaagatcaattttaacaaatatactctaaaatcaattgatgagctctaaagaaagtagaggaaatccccaggggacaaacccagcagtgcactcagacagcagccagcaacacagaactcagagctgcttgtggggccaaggccactctcagtaattcactcacagctttgggcctacagcggtttgctgggcactgggagacaagaacttgggcttccctgcccagagggggcagctgagtccgaaacttccacataaatgcagataaccaaaggacgcctgaacagctgtgaaaaacccaccagctgaaaataggaaccaaggaggaatcccatctgcctctatccagtacacagcaaaaaaaaccaacaaagtcacctctgagactctgtaactaaaggcctgctgggccatgcatctggagcagaaccagggatgatgccatttggttcagaaagcccaaagacagaaattaactcaaaggagttgtaggtccatcacacccccctgtgccaacaaaagcaaatgcaaacctctgtagaaaagctgctaaatctgggccgggcgtggtggctcacgcctgtaatcccagcactttgggaggctgaggtgggaggatcacgaggtcaagagattgagaccatcctggccagcacagtgaaacctcgtctctgctaaaaataaaaaaaaaaattagccgggggtggtggcgggcacctgtaatcccagctactcaggaggctgagacaggagaatggcatgaacccaggaggcggagcttgcagtgagctgagatcgcaccactgcactccagcctgggcgacatagcaagactctgtctcaaaaaaaaaaaaaaaaaagaaaagcaaagctgctaaatctggatccttcaggattcctcaagaccaagtttggtcaaatataacctgtcataagaaccaaaaatccaaatgtagaagagtaacacatgggccaggcacagtggctcacacctgtaatcccagcacgttgggaggccgaggcaggaggatcatgaggtcaggagattgagacgatcctggctaacacggtgaaaccccgtctctactaaaaatagaaaaaattagccgggcatggtggcaggtgcctgtagtcccagctactcgggaggctgaggcaggagaatggggtgaacccagggggcggagcttgcagtgagccaagatggtgccactgccctccagcctgggcgacagagcaagactccatctcaaaaaaaaaaaaaagagtaacacactaccacgcaagtaagagtgggcagagacataattaacagagagttagactgccaaagactcagacacagaaattatgagaccgaatatcaacctctacatgggatattaaatgaacaatggaatggaagaagagggtgagtgacagaggctatccaaaatgaccaggcgggattctaggacatggaagtggcaggcaccaaagtcagtggctcttcccaaatctccctcctgcaggcagctagaccgcatgccaggtcccaccgatgcatctacagcaatgcagggggcagggatacaagtgggggcagacagatgccaacagtcacgagacccaagaggcaggcccccatgtctcacagcccggatagggagtcctcaaccacccagtggtcttcactggaggccagcgggccaatgtggcagcagagcagaaactaggagaaaccaggagccacatggcccctgtgagtacttgaagccaacagacagatttagggggaaaaaaaatcagattacgtatttatttatatacttttgagacagggtcttgctctgttgcccagctgcagtgcagtggcacaatcacagttcacaacagtgtggacaaagaccctgtctctaaagaaaaaaagagggtgccaggtgtagtggctcactcctgtaatcccagcactctgggaggctgaggccagcagatcacctgaggttaggagttcaagactagcctgaccaacacagagaaaccccaagtctacttaaaaatacaaaattaggccgggcacagtggctcatgcctgtaatcccagcactttgggaggctgaagcaggtggatcacaaggtcgggagatcgagaccatcctggctaacacggtgagatcccgtctctattaaaaacacaaaaaatgccccccctccccctccgtctctttccacggtctccctctcatgccgagccgaagctggactgtactgctgccatctcggctcactgcaacctccctgcctgattctcctgcctcagcctgccgagtgcctgcgattgcaggcgcgcgccgccacgcctgactggttttcgtatttttttggtggagatggggtttcgctgtgttggccgggctggtctccagctcctaaccaagtgatccgccagcctcggcctcccgaggtgccgggattgcagacggagtctcgttcactcagtgctcaatggtgcccaggctggagtgcagtggcgtgatctcggctcgctacaacctctacctcccagccgcctgccttggcctcccaaagtgccgagactgcagcctctgcccggccgccaccccgtctgggaagtgaggagcctctctgcctggccgcccatcgtctgggatgtgacgagcccctctgcctggctgcccagtctggaaagtgaggagcgtctctgcccggccgccatcccatctaggaagtgaggagcgcctctttccggccgccatcccatctaggaagtgaggagcgtctctgcccggccgcccatcgtctgagatgtggggagcgcctctgccccgccgccccgtctgggatgtgaggagcgcctctgcctggccgcgaccccgtctgggaggtgaggagcgtctctgcctggccgccccgtctgagaagtgaggagcccctccgccccgcagccgccccgtctgggaagtgaggagcgtctccgcctggcagccaccccgtccgggaggaaggtggggggtcagcgaccccgcccggccagccgccccgtccgggagggaggtgaggggtcagtgcccccgcccggccagccgccccgtccgggagggaggtggggggtcagcccccgcccagccagccgcccgtctgggaggtgaggggcgcctctgcccggccgcccctactgggaagtgaggagcccctctgcccggccaccaccccgtctgggaggtgtacccaacagctcattgagaacgggccatgatgacaatggcagttttgtggaatagaaaagggggaaaggtggggaaaagattgagaaatcggatggttgctgtgtctgtgtagaaggaagtagacatgggagacttttcattttgttctgtactaagaaaaattcttctgccttgggatcctgttgatctatgaccttaccccaaccctgtgctctctgaaacatgtgctgtgtccactcagggttaaatggattaagggcggtgcaagatgtgctttgttaaacagatgcttgaaggcagcatgctggttaagagtcatcaccactccctaatctcaagtacccagggacacaaacactgcggaaggccgcagggtcctctgcctaggaaaaccagagacctttgttcacttgtttggctgctgaccttccctccactattgtcctatgaccctgccaaatccccctctgcgagaaacacccaagaatgatcaattaaaaaaaaaaaaaaaaacacaaaaaattagccgggcatgttggcgggcgcctgtagtcccagctattcgggaggctgaggcaggagaatggcatgaacccgggaggtggagcttgcagtgagctgaaatcgcgccactggactctagcctgggcaacacagtgagactccgtctcaaaaaacaaaaacaaaaacaaaattagccgggcgtggtggcacatgcctgtaatcccagctactcgggaggctaaggcaggagaatcgcttgaacccgggggggcagaggttgtggtgagctgagaccatgccactgcactctagcctgggcaacaagaatgaaactctgtctcaagaaaaaaaaaaaaaaagaaagaaaagaaaagaaaaaaggcggggtgccaggcgcagtggcttacatctgtaatgccaacactttgggaggctgaggcgggtgaatcacttgaggtcaagagattgagatcagcctggccaacacggtgaaaccctgtctctactaaaaatacaaaaattacctgggaatggtggtgggcacctgtaatcccagctactcaggaggctgaggcaggagaatcgcttgaacctgggaggcagaggttgcagtgagctgagattgcgccactgcactccagcctgggcaacagattgagactccgtctcaaaaaaaaaaaaaaggtgggggtacagcaccccatggtcctgctgagggaatggcctgagtctgtcaggcctctgtttaccgctttgcatcggcaggaaatccaggacacagagggtcatgctggagggtcttgtgaatgtgaaatcagcaagacctcagaggtgggaaactctacaggtcaatggaccaagttcctcaacagataaatttcaagaaaagggaagagatggaaggggaacctgaagattacaagaagtaagacatacaaatttccttaaaaagcaagactaactggcagtgtctagggatagacactcaagtaacgaaagaataaagagccaggcacggtggctcacacctgtaatcccagcactttggaaggccaaggcgggtggatcacgaggtcaggaattcgagaccagcttggccaacttagtgaaaccccacctctacataaaataaaaaaattagccaggcatggtggcacgagcctatagtcccagctactcaggaggctgaggcaggagaaatgcttgaacccgggaggcagaggttgcagtgagctgggatcacgtcattgcactccagcctgggcgacagagcgagactccgtctcaaaaaaaataaataaataaaaaaatgcaaaccggtgattactgttagggaagcttctgcagtggctgccaatgccttatccccagacctgcttggtgcttgcaatggtgacacataaggttcatccatcaaggcatacactgttttctgaggtgttcagtacgtattttgtttaataattaaaaagaggagggagaaaaaaaggccaagcaacagaagagaaggaaggagggcaagagcagcgggacaagcgtggtcgtgagctgagagttcctctggctggaacagagagtgtgcactcacagtcattctctttacctttagataatggttacgtgttccagatttaaacttttttttaaaaaattaccagctagatttgatttaaaagtgaaaaatgtgcctgtagtcccagctactcgggaggctgaggctgaaggatcacttgagcccagaaggtcgaggctgcagtgagctacgatcgcaccaccgcactccagcctgggtgacacggtgagattctgtctcaagaaaaggaaagaaaggaaaaggaaaagaaaggaaggaaggaaggaagtatcaagatgcaaaacccttcaagaaagaaagaaaaggaaagaaggaaggaaggaaagaaaagaaaaaaaaaagaaaaatatcaagatgcaaaacccctcaccagctcaaaagaaggatgaaccagtgtcactctggaaatgaacatcaacaacaagaggtttcgtttcacctcaccacatgggtaggcaaacagtaggtgcccaatacatctttgttaagaacaaatgaatgctacaattgcatgttgtgtccctagacatagtaatttgtgaatctaaaagtgaccaagtgcaaaaccagcccatcattctggctggtaaacaggctcacagccaactgccagcaggtcccaggcccaccactgagccagtggccacagcacatgcaacctgcagcgtcgagaggaaaactggccactagctccttaaggactgaactgatctaaggcacatgtgagtaagtgcccagatggtttcgatgggagccagcacccgtgttccgtaaaggaccagtcaatactttcagctttgcaggcctcacggtctatcacaactaaactctgcccttgtaacatgaaaactggcaccaacaacacgacctggctgtgttccaataacactttacaaaaacaggcagtagccaggctgtgacaagaggtctctgagtcctgaaggtcctgaatgaccaactctacagggtggcatgggccactgcagtggcagcactcctacccaagccagcagggctaacatgatttcccggcacacagctgtgttcaaggtctttcactccagacaagcagctgagtatgcagctcactccacgccgtacatggacaaagacaataactttctcctcagtgacacaaattccagaattctgcaaagtcaatcaaatctgctcaatggtaactgcagattcaggataattactgaattcctggcaagcaacacggtcatgtgtattctggtcagttgataagaccataatgagtggtgtgatgaggaaagaggataaaactcggcaacctcgggcagatcatggggacctcatttccccccattccctgcttcctcctcagaggacacttacttgatttttagcaagttgagggatttgttggaggaggctgttatctctccggtcttgtttctattgatgtaaaccgagaagccattattttggaagccaaactcctttgcaacctaaaacaaggcccaaagaacagaaatttaatgaaatgctaaagtatcactacacataccatacacaccagacactactagaagagtattcaccaaatttggaaagtgcccatcatttaccaaattcctcttgctattttgctcttttaaagaaatttgtactgttcacaaaggtgtcaattaaaatgaataaagtggccaaaaaagcaaaggtcttgtcaatgatgaaactttgtaaaacatttaagactttgaagcaaacaagagttaatggctatccttgttttgttttcagacagtctcgttctgtagcccaagctggagtacagtggcatgatctcggcttactgcaacctccacatcccaggttccagtgattctcctgcctcagcctcccaagtagctgggattacaggcgcctgccaccacacccggctgatttttgtatttttagtagagatggagtttcaccatgttggccacggtggtctcaaactcctgacctcaggtgatccgcccaccttggcctcccaaagtactgggattacaggcgtgagccaccatgcatggccaatggctatgtttgaaaagttcaatttccatttttgaattcaattgtaaaaacccaattccaggccaggcgtggtggctcatgcctgtaatcccagcactttgggaggatgaggtgggagtatcacctgaggttaggagttcgagaccagcctgaccaacatggtgaatccccgtttctactaaaactacaaaattagccaggcatggtggcacatgcctgtaatcccagctacccgtgaggctgaagcaggagaatcacttgaagctgggaggcagaggttgcagggagccgagatcgtgctattccactccagcttgggcaacaagagcaaaactctggccgggtgtggaggctcacacctgtaatctcagcactatgggaggccaaagcaggtggatcacgaggccaggagttcgacaccagcctggtcaacatagtgaaaccgtctctactaaaaatacaaaaattagccaggcatggtggcgcacacctgtaatcccagctacccgggaggctgaggcagaactgcttgggcctgggaggtagaggctgcagtgagtcgagatcatgccactgcactccagcctgggtgacagagcaagactttgtttcaaaaaaaaaaaaaaaaaaaagcaaaactctgtctcaaaaaaataaaaaacccggccgggcgcggtggctgacgcctgtaatcccagcattttgggaggccgaggcaggcggatcatgaggtcaggagatcgagaccatcctggctaacacggtgaaaccccgtctctactaaaaatacaaaaaattagccgggcgtggtggtgggcgcctgcagtcccagctactcgggaggctgaggcaggagagtggcgtgaacccgggaggcggagcttgcagtgagccgagatcgcgccactgcactccagccaggacgacagagcgagactccgtctcaaaaaaaaaaacaaaactcaattccaattctgaaacctaacacagaatggtgcgactaaatcataaaacgtccactgtgcagggcactttgctagatgctgggaatattcactcattccttcaacaaatattaagcagttctatgtgctcagctccattctgggtgttcagatcacaaaaatgaactagaaaagacaaggtttctggccgggcgtggtggctcatgtctgcaatcccagcacttcgggaggccaaggcgggtggatcacttcaagtcaggagttcaagaccagcctgaccaacatggtgaaaccccatctctcctaaaaatacaaaaattaggccaggtgtggtgactcacgcctgtaatcccagcactctgggaggccgaggtgggcggatcacgaggtcaggagatcgaggccagcctggccaccttgatgaaaccccatttctactaaaatacaaaaattagctaggcgtggtggcggacacttgttatcccagctactcaggaggctgcggcaagagaattgcttgaaaccagaaggcagaggttgcagtgagccaagatggcgccattgcactccagcctgggcgacaagagtgaaactccgtctcaaaaaaacaaaaacaaaaacaaagacaaaaattagccaggcatggtggtgcacgcctacagtcccagctagtcggtgggctgagacaggagaatcacttcgacctgggaggcggagctgcagtgagatgagatcacgccattacactctagcctgggcaacggaacaagactccacctcaaaaaaagaaaaacaaaaaaaagacaaggttcctgctgtcaagcagtttaccaacaaatgggggagacaaagtcaacaaaggtcgaaataagcactacgacagaaaaggaaaagaaacctcagatgggaggctagaagtctctctgaagagcttcagctgagcagggcccacccagcggtgggtaagcccgccacacgcgagctgggagaaaaggccacagggagtaggagcaagcacaaagaccaggaggcaggaagggtgttggaaacacggaggccagaggccaataaacaataaggaagatggaaagagatgaggctggcgaggcagacagggccgtgggaagccacacagacgaaaggcagggggaatcatcatccacaaaatccctgttgctcaacaccacactgaagaggaagctagagtgccaattagagacaagagagatgggctgagacaggggatgagatgggacaggatggtggggatgaaggcaagagcacactttccagcagtggtcatcaccaggcccagctgacgagcaggaccaggggcaggaatggaatgagagaaaggaaggaggtcagagtaaagctgagaattctagattgagaaactatgtggaggtaacacctgtgcagggaccatgaaaggaaaggctaaaaaaggaagaagactagagggaaaatcaggacttccatttgacactgagatcggaggtgacaaccagacacactgcagtgaagccgtccagcaggcaggtgggcgcatctgtgtctgagcccaggcaaggggccagagcaagagctctacaccgaggggtcatcagagtagatgtacccaaataaaaggaatgtgaatctcggtaaagaaacaaatcataaaagaacaatcaaatggaaattctagaactgaaaaacacaagaacagaaataaaaaattcactgaacgggcttatcagcagaagggagagagcagaagagtcaacctaaacataggtgaatagcttgtggtcccagcaactcggaaggctgaggtggaagcactgcttgagcccagaagtttaaggctacaatgagatatgatcacaccactgcactccagcctgagcgacagagtgagaatccaaccaactctaaaaagaaaaacataaatgaatcaataaaaataacagctatataatctgaaggcagagatttggggaaaaaaaaaacagccttaggaacccatggtacaggatcaaatgctcctcactagaaaaaaatgagggttgggcgcggaggttcaagcctgtaatcccaacactttgggaggccgagttgggcagatcacctgaagtcaggagtttgagaccagcctggccaacatggtgaaatcccatctctactaaaaatacaaaaattagacaggtgtggtggtgcacccctgtaatcccagctactcaggaggctgaaacaggagaatcgcttgaacctgggaggtggaggttgcagtgggcagagattgcgccactgcactccagcccaagcgacagagtgagacttcatctcaaaaaaaaaaaaaaaaaattagccaggtgagctggcacgtgcctgtaatctcagttactcgggaggctgagccaggaaaaccgcttgaaccccggaggcggaggttgcagtcagccaagatcgcgccactgcactccagcctgggcaacagagcgagactccatctcaagaaaaaaaaaaaagaaaagaatgaaaatagaacagaaaaatacttaagagtggggaaaaccccaaaatttaatgaaaaacatcaaatagcaactccaggaagttcagcaaactctctcaagttaagatacaaagaacaccactgcaaggcacaccagagtcaccctactgaaagccagaggtcaacgaagacgagaagaccaagaagacggtggaacgacagcttcaaatgctcaacaggaccaggcaccgcggctcccgcctggaatcccagcatccaggagacagagtggggaggatcacttgaggaaatcaagaccagcctagacaacatggtgaaaccccatctctaccaaaaaattaagaaattagctaggaagctcacgtgggaggatcgtttgagcccgggaagtcaaggctgcagtgagctgtgactttgccagtgcactccaacctaggcaaaaataataataataataattttaaaatggactgggtgagggtggatcatacctgtaatcccagcactttgggaggctgaggcgggcggatcacctgagatcaggaattcgagaccagactggccaacatagtgaaacctcgtctctactaaaaatacaaaaatcagctgggcatggtggtgcgagcctgtagtcccagctactcgggaggctgaggcaacagaatcacttgaacccgggaggcggaggttgcagtgaggcaagattgtgccgctgcactccagcttgggcgacacaatgagacttcgtctcaaaaaaaaaaaagaaaaagggccaggtgtggtggctcactcttgtaatcccggcacattgggaggccgaggcaggcggatcatgaggtcaggagatcgagaccatcctcactaacacagtgaaaccccatctctactaaaaacacaaaaaacattagccgggcatggtggcgggtgcctgtagtcccagctactcgggaggctgaggcagggaaatggcatgaacctgggaggcagagcttgcagtgagccgagatcgcgccactgcattccagcctgggcaacagaaagactccgtctcaaaaaaaaaaaaaaattgatgcatggtggggaacaaaaatgaactgtcaactcagaaatctgttttgaggccaggtgcagtggctcacgcctgtaaccccagcactttgggaggccaaggcgggtggatcacctgaggtcaggagttcgagaccagcctgaccaacatggtgaaactccatctctattaaaaagacaaacttagccggacttggtggcgtatgcctgtaatcccagctactcggaaggctgaggcagaattgcttgaacccgggaggctgaggcaggagaattgcttgaacacaggaggcagaggctgcaatgagccaagatcatgccatcacactccagcctgggcaacaagagcgaaactctgtctcaaaaaacaaaaacaaaaattagccaggtattgtggtgcacacctgtaatcccagctacttgggaggctgaggcaggagaactgctggaacccaggaggcggaggttgcactgagccgagatcacgccaccacattccagcctgggcgacagaaaaagactccatctcaaaaaaagaaatttgtattgaatgaaaatatccttgggaggccaaggcgggcagatcacgaggtcaggagatgaagaccatcctggctaacatggtgaaatcccgtctctactaaaaatacaaaaaattagccaggcatggtggtgggcgcctgtagtccagctactcgggaggctgaggcaggagagtggcgtgaacccgggaggcggagcttgcagtgagccaagatcatgccactgcattccagccttggagacagagcgagactccctctcataaaaaaaaaaagaaaaaaaaaagaaaaagaaaatatatccttcatggctgggcacggtggctcacactgaagcgggtggatcacgaggtcgggagttcaagaccagcatggtgaagatagtgaaaccccgtctctactaaaaatacaaaaaattagtcaggtatggtggcgggtgcctgtaatcctagctactcgagaggcttaggcagaggattgcttgaacccaggaggcagaggttgcagtgagccgagatcatgccactgcactccagcctgggcaacagagtgagatgccatctcaaaaaaaaagaaaataaccctcatataaacacagggcaaaacgaaaacattttcaggtcaaaaaaacccaaaggtctgtgaccaacaaacctacctacaacaaaggctaatggatgtttttcagtctgaagagaaacaacaccagacagaaatagtctgggggaatccatgggaaaagtaaataaggaagaaactgtgaagataagctaagaagtacataatatgcaactatcacagtaaatgaaatattttgtgattggttaaaaaaagaaaaactgtcatgggaatcctggacacaatgcaggtcaggagaccagggaggagccagggatgattctttgagtcaactgtagtcatatctacaattcatacttttttttttttttgagacagtctcactctgtcgcccaggctggagtgcagtggcgcgatctcagctcactgcaagctccgcctcctgggttcacatcattctcctgcctcagcctcaccagcagctgggactacaggtgcccgccaccacacccggctaattttttgtatttttactagagatagggtttcaccatgttagccaggatggtctcaatctcctgaccttgtgatccgcccgcctcggcctcccaaagtgctgcgattacaggcgtcagccactgcgcctggccactcttatgaaatacttttttttttttttttttgagatggagtctcactctgttgcccaggttggagtgcagtggcaccacctcgactcactgtaaactctgccttctgagtcaagcaattctcttgcctcagcttcccaagtagctgggattacaggcacctaccaccacgcccgactaatttttgtatttttagtagacggggtttcaccatcttggccaggctggtcttgaactcctcacttcgtgatccacccgccttggtctcccgaagtgctgggattacaggtgtgagccaccacgcccagccgtgaaatatttttacacttacctttgggctcttggtcctataattttgagcagtgatcagctgtgacaaacatctcatcctatagcaatccaacccaactgtgatagagaaaggcaatgcaagaggcaatttgggaatagggaaaataagaaaacgaggaaaagagaaaaggtatcgatggcagtaagagtagaggatgaaaaatatcctgagggtcaatacccaggccacagatacctttttcaaaaatgttgctgctgtttctctctttgttgctgtgatccgcttcactccatccggggactggacacgaattatctgttgcaaacaaaacatgatggttactgcacagcctagtgaggtcctgatctaatactacggcttccatctgtggtcttttagcatctgggtcactgaaaattaaagccaaacctcactcttcacctttcaatacccagctcaatccttctagaatatgatgccgaggggtgagattcatcaacatatggggagatattttaagagtactgtcctctcaactcttagtttcactcagaaaacaactttaattcctaatcactatttatagagtatatgtaaaacactttttgtctcttcagacttaaaacagagaaaaacccaccatgaaccatgaatgaactgtgttctttaaaaaagatgttactttggggaaaaaaaaaaaaaaaagatgttactttgttccaggatctatatacaaacattagacagtcttcaagagtcctacaatttaaaagaatcacaggaaattttctaattgttactttttttttgcttttttgagacagggtcttgctgtcacccaggctggagtgcagtggcaaaatcacagcttactgcagccttgacatccaaggttcaagtgatcctctgacctcagcctcccgagagctggaaccacaggcttgcaccaccacaccaggttaatttttttttttgtagtgacggagtgtcatatttcccaggctgatctcgagctccggggctcaagtgatcctgccactgtgctgggattacaggtgtgagccacaacgccagctattacttactttccctaaaaaacgtttaaaaatggccagacacagtggctcacgtctgtaattgtagcactttgggaggccaaggcggtggatcacttgagctcagaagttcaagaccagtgggcaacatggggaaaccccatctctactaaaaatacaagttagccaggcatggtggcgtacgcctatggtctcagctacttggggagctgaggcacgaggatcacttaaaccagggaggtcgaggctacagtgagccaagatggtgccactgcactccagcattggtgacaaagtgagaccctgtctcaaaaaaagagattaggctgggcacagtggctcctgcctgtaatcccagcactttgggaggccaatgcgggcagatcacctgaggtcaggagttcgagaccagcctggccaacatggtgaaaccccgtctctactaaaaatacaaaaattagctgggcgtggtggcgggcacctgtaatcccagctacccgggaggctgaggcaggagaatcgcttgaacccaggaggcagaggttgcagtgagccaagatcgtgccattgcgtgacgaagagcaagacttcgtctcaaaaaaaaagtaaaaatttaaacttaaaaaagaaattaaaattaaaagcaataaaggtctttaatggtaaaatttagtagggttttgaaaaaatattttcagctgggcacagtggctcacacctataatctgtgcacttcaggagaccaaggcaggaagatctctttagcctaggaattcgagatcagcctggccaacacagcgagaccccatcctaatttaataacgtgtgtgtgcatatatgcatattaaagtgtacatatatatatatatattttttttttttttttttttttttttcccccacggcaagcctaaaaaggttggcagatctggaagactactggacaaagggcattactttctaagacaacttgatgtttatgctgatgaaagccatcgtgaaggtgagttatcatgcctggccaacagcacaggcccctgctttagacaaggaggatgacatggcatgctctgcagcaaacaaagacctgctccaaccatccgcgggacgggaaggaaggcagacaggaacatgcgcataagtgtcctagcttctcctctcagcaaagactgatggtgcattctatagcttctttctctctcatttcctgcattaccatctcttgtatttagctcattttttttttccccgagatgaagtttcaatcttgtggcccaggctggagtacaatggcgcaatcttggctcactgcaacctctgcctcttgagttcaagtgattctcctgcctcagcctcctgagtagctggaatcacaggcgcccaccaccatacccagctaattttcttttttttgagacagtctttttccgttgcccagggtggagtgcagtggcgcaatctcggctcactgcaacctccactcactgcaacctccgcctcccaggttcaggcgattctcctgtctcagcctcctgagcagctgggattacaggcgtgcaccaccaagcccagctaatttttgtatttttagtagagacggggtttcaacatgttagtcaatctggtcttaaacgcctacctcaggtgatccacctgcctcagcctcctaaagtgctgggattataggcatgagccaccaaccctggcctagctgattttttatagtgaaacatttcaattcccttatttccttttttatttcttttttttttttcagctcttgttgcccaggctggagtgcaatggcgtgatctcggctcactgcaacctctgcctccccggttcaagtgattctcctgtctcagcctcctgagtatctgggattacaagtgcctgccaccacgcctggctaatttttagtatttttagtagagatgggatttcaccacgttggccaggctggtctcgaactcctgacctcaagttatccacccacctgggcctcccaaagtgctgggattacaggtgtgcaccaccacacccggcctcccttatttcctttttcataaattctataactattttctgtgaggttaccacgagtgttacattaaacatcctcttcaaccattatgcagatgaaaactgtcacaagccattgtctaaaaaagatttccactgatacaggacaaaacaccataaaggctcagtctactgggatttgtccgcttttagtaaagtaactaagcctaatctagattttcctaaaataggataaccctgtcctgcattttcccataactttcacttggcagaaaaggctccacccaatatgttctcaacttttaagtcaggagattgagaccatcctggctaacacggtgaaaccccatctctactaaaaatacaaaacattagccaggcgtggtggagggcgcctgtagtcccagctacttgggaggctgaggtaggagaatggcgtgaacccaggaggcagagcttgtggtgagcagatcgcgccactgcactccagcctgggtgacagagcaagactccgtctcaaaaaaaaaaaaaaaaagaaaagaaatacaattctttatacttctaacgtctagtatacttcattctagattcaataccccagaaaaacgttttcacaatatatagcattaggtaaatacttccacttatttgtttctaaaatctgtctgccaacacttagctatcttaaaaaggaaagctctgttctaatgaaggggaacatgtgaatgttccttcaaacgatgactctggaacaagagcatgttaccgccattctttacagagctaaatggttcaggctgcagaattctaaggtgaagaagtcatcctacttgatcctctaccacagaagatgggagtccaggtttccaaggccaactccagtatttaacaagagacaaacataatttgtacgatggaaagttctggcctagcctctgacacagactacaaaatgaaatacacaggaagagacagacctgacaacatgaacacacagcctcttggtaacttaagtttccctatttataagaaaataagactagaacgcttcttggggaagttgaagaactggtgagatacagttaaatccacagaaactcttttctccccccaagacagagtcttgctctgtcacccagagtgggagtgcgatggcgcgacctcggttcactgcaacctttgcctgccgagttcaagcaattctcttgcctcaagcctcccaagtagctgggattataggcgcccgccaccgcgcccagctaattttttttttttttttaagagtctcactctgtcacccaggctggagtgcagtggtgcgatctcggctcactgcaatctccgcctcccgggttctaacttttctgcctcagcctcctgagtggctgggactacaggtgcacgccaccacgcccggttaattttttgtattttttttttttagtagacgtggggtttcaccgtgttgcccaggctggtctcaaactcctgagctcaggcaatccacctgcctcggccttccaaagtgctaggattacaaacgtgagccaccacgccctaatttttgtatttttagtaaagacgtggtttcaccatgtcggccaggctggtctcaactcctgacctcattattcacctgcctcggcctctcaaagtgctgggattacaggtgtgagccaccatgcccagcccagaaacttttcaaaagatctctttcttaaattcaaaataactttttaaatcaatttcaaaagaagagtgttttaattcctcacaatctgagacattcaacgagatccaatgctgtcaatgagagcctagccttatacactagtgggaaaaaaaaaatggccttgtctgaaacacttttcacttgtcaatggttattttaactcagttaaaagtacaaaggtagtttgaaagaaggtttcagtgctaattcctaacctatttctaggcaaagtcaccaatgattaacacttttttttttttttttgagacagtcttgctctgtcgcccaggctggagtgcagtggcgcaatctgggctcactgcaacctccacctcccgggtttgagcgattcccctccctcaacctccagagtagctgggataacaggtgcatgccaccacacccggctaattttttatttttagtagagacagggtttcaccatgttggtcaggccagtcttgaactcctgacctcgtgatccgcccacctcggcctcccaaagtgctgggattacaggcgtgagccactgcatggccacattttatttttcaaaggagtcaaaggtttcttggccgggcatggtagctcaggactgtaatcctagcaattttgggaccccaaggtaggaggatccctcgagctcagagaccagcctgtacaacatagtagagacctcatctctataaaaaaatgtttttaattaaaaagatttaaaggccaggcgcggtggcttatgcctgtaatcccagcattttggtatgccaaggcgggcggatcacgaggtcagaagttcgagatcaacctggccaacacggtgaaaccccatcaccactaaaaataaaaaagacatcagccatgcgtgttggcgagcacctgcaaccccagctactcggctgaggcaggagaatttcttgaacccgagaggcggaggttgcagtaagcagagatcgcaccactgaactccagcctgggcgacagagtgagactccatctcaaaaaaataaaataaggttaaaaaaaaaaaaaaaaaaggagtcgacgtttcctaagtttctcctgggccatatattcattccactcatctccaggttgggaaacatggaggcaccaagagggcccctgactggagagatgatggaaccaccagagaacagccttgcaaataagtgctaggttctcctggagacccatttgtttgtgtgtgtgagacagtctcattctgtcgcccagggtggagtccagtgacgccacctaggctcactatgttgtccaggctggtcttgaactcctgacctcaggtgatccacccacctgggcttcccaaagtgctgggattacaggtgtgagtcaccgcgccgggcctggagacctattctagacaacacctggcaaaactgcagagactgtcacaatgctacagtatgaacattactcttcacccaatactgctaagcttcccccagaaatcccaaatcttccttaatattaaccaaaatgctcctgtccaatggtcagttagtttttttcccatcacatttacttttgggaagaaacttctcacaacttaacgagggactggttttctgatttgtcactgatattttttacgttaaggaggagtgtgtgacaattttttttttttttttgagacgcagtctcgctctatagcccaggctggagtgccatggagggatctcagctcactgtaacctccacctcccgcgttcaagcaattctcctgcctcagcctcccaagtatctgggattacagtgcgccatgacgcccggctaattttttgtatttttagtagagacaagattttgccatgttggccaggatggtctcgaactcctgaccccaggtgatccacccgcctcggcctcccaaagtgctgacatcacaggcgtgagccactgcgccgggccgacaatttcaatttcaggtaaaaagtgaaatcaacatcatttacaacattccttttaaagaggaattgtcaagttgtccttccaagtaaggagcaaagccggcaagttactgtgttttcattttcccaggtcttctggtggggagggagctctgtaacgtccccgtctgcagagctgctctccttagtgactcatgacaaggcacttgctgggaagcgggagagcaggaggagagaatcagagggagattaggataagaggtgtccctggctctgagaggggcaggactggctgggagtccctggaattagaccaggaagtctcctggagccgggaaacgggtggggaaggagggcggtttctcttcgccacagtccattctccctgcttagaaaggctcggcctttccctgcccagggcggggaaccggggtcgtaagtcccctggggagggacacggacgggaagcagccgaggggggtgaaagtccccgagaggggcccagccactacagagaaagccctggcgagagaagagaaaggggccgagtcgcggcgccggcaggcccgcctcccccacaggccgaggccggcaaatctgctgcctcatcccggcgtccccgctcccgcccggccgccgcactcacgatgctctcggccatggcggctgctcctgcctccgggctcgagccccgggccgccgccgcctgccgccccaagggcctcgcagacccggccgcggcctcagccccggccccggcctccctacgccgccgccaccgccgctccagcttcgcccgcccggctccgccagccgccgacgtcccggtgcctcgctcaatacgctcccctcgggcgcgaggccgggaaaccaggttccggccccaccaacggctcgacgcatgcgcagggcggcgccgctgacccgcccccgccatccctgcaactggaggaggggattttggaaagttgcgtctgagattacttctgctcgtcctcggaaacccaagcggcacaggaaagtccaaaaaggaagcaaagacgagcatccgaagtctcacccaaaaataactactgctgcgtattatagcgtattataattggggaaacagcattccaaacttctctccatgcacaggtaagtagagaaacaatttcaggaaggcaggatcacaccttcatgtttttttttttaagtattttttaaatttaacataagaaaaacaaacgagtttaaactgcatttcaggccgggcgcggtggctcatacctgtaatcccagcattttgggaagccaaggtggacggatcacctgaggtcaaaagttcgagaccagcctggccaaaatggtgaaaccccgtctctactcaaaatacaaaattaggccatacgcggtggctcacgcctgtaatcccagcactttgggaggccgaggcaggtggatcacctgaggtcaggagttcaagaccagcctgaccaacgtggtgaaaccccgtctctactaaaaatacaaaaattaactgggcgtggtggcgggcacctgtaatcccagctactcgggagtctgaggccggagaatctcttgaagcgaagaggcggaggttagaatgaactgagttggtgccactgcactccagtctgggcgacagagtgagacttcatctcaaaaaaaaaaaaaaaagacgtcacttcacagattctaaggatttttggagttggataccaggaaaccggaagactaaatgtatacatatttcacaacatcacaattactgtgacagtttttttaaactatgttaaattacattaattgattaaattatgttagtaattgtattagtttgctcagggtgccactgtaactacccaacatattgtccctgcccactgcctagactttatcaagacaggggaattgcaataaagagtttaattcacacagagccagcttgtacaggttactgaggttttattactactcaaaaaaaattagtgtccttgagaattcagggatcagagttttttgttttttgtttttttttgtttttgagtccgaatctcactctgtcacccacactggagtgcagtggcgcgatctcggctcactgcaaccttcacctcctgggttccagtgattctcctgcctcagcctcccgggtagctgggactacaggcgcacactaccatgcctggctaattttgtatttttcgtagagacggagtttctccatgttggtcaggctggtcttgaactcctgacctcaggtgatccgcccacctgggcctccccaaagtgctgggactatagacgtgagccaccgtgcccggctggggatccgcggttttaaggataatttggtgggtatggggtcagaaagtagggagtgttgattggttgggtcagaggtgaaatgatagggagtcaaaactgtcctcttgtgctgagtcggttcctgggtgggggccacaagatatgagccagtttatcaatctgggtggtgccagctgatccatggagtgcagagtctgcaaaatatctcaagcgctgatctgttttttaatagtgatgttatcctgagaagcaatttgggaggtttagaatcttgtagcctccagctacatgactcctaaaccataatttctaatcttatggctaatttgttagtcctgaaaaggcagtcttgtccccaggtaggaagggagtttgttttgcaaagggctgttaccatctttgtttcaaagctaaactataaactaagcgcctcccgaagttatttcagcctacacccaggaatgaacaaggacagcttggaggttagaagcaagatgggttcagttaagtccgatctctttaactgtaataattatctcagttataagaaaatataacataacaaaatctctcacagactgggtggtggtttggaattacttttctttttttttttttttttttttgagtcggatctccctctgtcgcccaggttggagtgcaatggcgcgatcccagctcactgcaacctccgcctcgtgggttcaagcgattctcctgcctcagcctcctgagtagctgagattacaagcgtgcgctaccacgcccggctaatttttatatctttagtagagacagggtttcaccatgttggtaaggctggtctcgatctcctgacctcgtgatccacccgcctcagcctcccaaagtgctgggattataggcatgagccaccatgcccggcctggaattacttcctaacagtcctggaagctagaatcccagatcaaggtgtcagtagacgtggtttctcctttgttttcttcttttttttttcttttaaggctggggtcttggccgggcgcggtggctcacgcctgtcatcccagcgcggtggctcacgcctgtcatcccagcacggtggctcatgcctgtcatcccagcgcggtggctcacgcctgtcatcccagcactttgagaggccgaggcaggtggatcacgaagtcaggagatcgagaccatcctggctaatatggtgaaaccctgtctctattaaaaataaaaaaaaaattagccgggcgtggtggcgggtgcctgtagtcccagctactcgggaggctgaggcaggagaatggcgtgaacccgggaggcagagcttgcagtgagccgagatcacgccactgcgctccagcctgggcgacagagcaagactccgtctcaaaaaaaaaaaaaaaagaaaagactggggtctcactcccatcgccgaggctggagtgcagtggcacaatcgtggctcactgtagcctcgacttcccaggctcaggtgatactcccacctcagcctcctcagtagctgggaccacaagtgctcacaatcacacctggctaactttttgtatttttagtagagatgggatcttgctatgttgcccaggctggtctctaactactactaggttcaatcaatccacccacctcagcctcccaaagtgcttagattacaggcataagccgctgtacccagccaggtttcttcttatacctctctccttagctcgaagatggcaccttctccccgagacctcacatgttttttcttctgtgcacacattcctcgtgtctctccatgtgtcccaccgtgtgtcccaattttcttgtaaggatgttggattagggcccacgctaatggcacttatttatttatttagggatggagtcttgctctgtcaccaggctggagtgcagcggcaccatctcggctcactgcaacctctgcctcctgggtcccagcaattcccctgcctcagcctcccatgtagctgggattacaggcatgcgccacgatgcccagctaattttttgtacttttagtagagacagggtcacaccatgttggccaggctggtctcaatctcctgacctcatgatccacctgcctcggcctccctaagtgctggaattacaggtgtgagctaccgcgcccagcccctaatggcctttaaaggccctgtctccaagtcccattctgaggtccggggggctagaactttatcataagaatgtaaggggcacaattcagccataacagtggtagatgatgatcgtttcattaaaagattacccagactttggccgggcgtggtggctcacgcctgtaatcccagcactttgggaggaggaggcgggcagatcacttgaggtcaggaggtcgagaccagactggccaacatggtgaaaccccatctctactaaaaatacaaaatcagtcaggtgtggcgcctgcaatcctagttactcaggaggccaaggcaggagcatcgcttgaacccaggaggcagaggttgcggtgagtcaaaatcgtgccactgcattccagcctcagcaacagagcgagactcttgtctcaaaaaaaaaaaggttacccatccttagaacagactgagttggaggccgtggacagtccctgtgaccgtgaccctggctgtggagctgctgcagggcccatgaggttgggtttgtcacctttggggaggtgaagggaagctggagcccagaagctcagcctgcagctctggtcctcgccccgacttcccacctgcagcatatcccacttctccgaggaagatctgaagactcagagtggccttcaaggcctcacctgatccagccctgtcacctcatggacctccctcccacccccatctccgcttgccccacacagccaggtgacctttcctcctaaaacttgcccggtgtgctcccacccaggcgtctcacgcgcgcctgaaaccctctgcctgctccatcagtacattgcctgctgtgctgcaccacccagaccacctctttggactgctgagtgttggtggctgagtccgggcacagtggctccagcctgtaatcccagcactttggaaggccaaggcaggagaatcacttgagtccaggggttcaagaccagcctgggcagcacagcagaaccctgtctctacaaaaaaaattcaaaaatgagtgaggcaaggtggcgtacatctgtagtcccgggaggcgaggttgcagtgagccgagattgcgccattgcactccagcctgggcaacaagagcgaaactcagtctcaaaaacaaaaacaaggaggtgatctggtggggggacgctgtttcattcgtgcagtgaacaagccgggggatagattggcgctggggctgcccatgggtctcttgggattggggttgtgaaccaatttaccagggtctgattccctggttgggagctgatggagcggctgctgaccctgcagagctgaagtccgcatggggggctgcagtgagagccacaaggctggcacccaaacatgcctgcctgagtcacacctgcgctgagcttaggggacccacagagccagggctggggagaaatatatctccacaagcagaggcctccttaagctctaaaatgtgattcttcacatgactcaactgtgactccggcatctgggtagggctcgcacctcccccattcccatgcccagggctgcactgttcacagactagcccagggccgcagtcaggaccagcccagcagcccagccacagaggagccagcgaacctctcccggcgcctgtgctgggggctttctgttccagcgtcaaggatggaggagggggagaggagccccttactgtcccaggtgagccatgccaagtggccttgccctgaggttggagatgtccccagccctgaagtcctaagggaagtccctgggctgggttcacacccacccctgcccctggtgccaccccacacctcaatgctgagattgggttgaggggggtggttctaggcagccccctcccccttccccactgcgcagttctctcagccccatgctggcctctggtcaagggatctgccagatctccctgagggccttgggggcaatctttggctcagggtgcaggagggggtgaaggcaaatgtcccttgcagccagcctccaacggcctctggcccccagtggccccagtctggccaaccaggcactgacagcctgtccttttgcttctagtgacttgttgaggtcttgggggtgataaataaccctcctctggggccgggcacagtggctcactcctgtaatcccagcactttgggaggctgaggagggaagattgcgtgagcccaggagttcaagaccagcctgggcaatgtagcgagaccctgtctctacaaaatattatatatatatatatatatatatatatttagatagagtctcgctctgtcaccaggctggagtgcagtggcacaacctcggctcactgcaacctccgcctcctcggttcaagcaattcacatgcctcagcctgctgagtagctgggattacaggcacatgccaccacacccagctaattttttttagtcgagacagggttttaccatgttggctaggatggtctcgatctcctgacctcgtgatccacccgcctcggcctcccaaagtgctgggattacaggcatgagccaccgtgcccggcctacaaaaaataattttaaaaaattaccgggacggccgggcgcggtggctcacgcctgtaatcccagcactttgggaggccgaggcgggcggatcacgaggttaggagatcgagaccatcccggctaaaacggtgaaaccctgtctctactaaaaatacaaaaaattagccgggcgtagtggcgggcgcctgtagtcccagctacttgggaggctgaggcaggagaatggcgtgaacccgggaggcggagcttgcagtgagccgagatcccgccactgcactccagcctgggcgacagagcgagactccgtctcaaaaaaaaaaaaaaaaaaaaaaaattaccaggacatggttgcagtgcctgtagtcccagctactcaggaggctgaggaggaaggatggcttgagcccaggagtttgaggctgcagtgagctgagagcctgatgctgtgatcagcttcttcctggtgaaactggattggaatgggatccttgcccagcacacagccatggctgctttttattatttatttagtttttgagatggagtctcgctctgtcacccaggctggagtgcagtcacgcgatctctgctcatgcaacctctgcctcctgctcatgcaacctccacctcctgggttcaagcgattctcctgcctcagcctcccaagtagctgggattacaggtgtgtgccaccacgcccggctaattttttttttttttttttttttagtagagatgaggtttctccacgttgctcaggctggtctcgaattcccgacctcaggtgatccacccacctcagcctcccaaagtgctgggatgacaggcgtgagccacaacgtccagcccggccatagcttcttattctcctttttaaaaaaactcttcccggcagaactgggcacctgcggggctgcctcttcccccacagagagagaccagcaagcctttcctgccagtgggccagggggtcccctctgaaggccctgcagcctccaggcggtcttcctgggctcttgggcaccctcctccctgtcctgggagcctgttgggcagggcactgtcctgtcctcggcagcagggtccagtgccgtgtccacactcagtgcgggccgttggtggggccgaagaatgggtgctgggatgtgaggactggtttcagaggggaaagaaaagggcagccatgtgggccagcccctgtggctggtgaggaagcccctctacacaagttccatgctgcaggcacacacagactgatccacgcagatgctgtttcaaactctggggacgcagccccgcctgtgtgctgcgggaaagccagggcgaccctgacccggggaggccgcagacacccacgcataggaccaggagggagtgggtgtgttcactgagcaccgccctgcttggtcttcaccacagcctttcagagtctgctcatcaccctgttctaaaggtggggtcccaccagagctgggaccctcactgccccttctgctgctcagccgagcgggacggccctgagggccccctgcccctggctgtccgcatctctgagctccagtgctgccctccgccatccggcatcctcccatccctcgaaggctctgccaccatgctcttccctgacccctcaccagttgtcacagagtctgggtgaatgcggtctcaccctgttcctcttccctctgcaggaaactgcaggccagaagcccctctctgtgcacaggccacccacctcaggctgcctaggtccagtgcccagggaggaccaggcggaggcctggggctgcagctgctgtcccccggagaccaagcaccaggccttgagtggcacccccaagaaaggaccagccccttccctctccccagggagcagctgcgtcaagtatctgatcttcctctccaacttccccttctccctgctggggctgctggccctggccatcgggctctggggcctggctgtcaaggggtctctgggaagtgatctgggggggcccctgcccgcagaccccatgctggggctggcactgggagggctggtggtcagcgcagtgagcctggctggctacctgggcgccctctgtgagaacacctgcctgttacgtggcttctctgggggcatccttgccttcctggtgcttgaggccgtggcgggggccctggtggtggccctctggggcccgctgcaagacagcctggagcacaccctgcgtgtggccatcgcccactaccaggacgacccagacctgcgcttcctcctcgaccaagtccagctcgggctgaggtgctgcggagctgcctcctaccaggactggcagcagaacctgtgagtcttggagtgggcgagggacagggccaccacagggtcgcagaggccacacacccttgtgcgtgtacacacagtcactcacacgtacatactcattcgtgcatgcccacatgcatgcacacgtatacccacatgtacacgcatatccacactggcacgtctcgtgctcacaggtttcacgtgtgtggacacacacctacacactcctctacactgacatgaacatgttcttgtgcacacacaaaacagcctcacactcaggcacacactcacactcaaacatgttcatacacacacgtgtcatgcacacaaggtataggggtgcttgcctctccttgttctatgggctcagggccccaatcagccctgcggcccccagaacgtgcagggtgactctgttccccccgccagggccaggaggactacccaggagcttagttgagaagctgagcccacaaacttagaaagtcatttttctgctgggcacgatggctcacacctgtaatcccagcactttgggaggctgaggtaggcggatcacctgaagtcaggagttcaagaccagcctggccaacatggtgaaaccccatctctactaaaaatacaaaaattagccaggcatggtggcaggcacctgtaatcccagctactcaggaggccgaggcaggagaatgacttgaatccaggaggtggaggttgcagccaaaacagcaccactgcattccagcatgggcaacagagcgagcatccatctcaaagaaaaaaggccgggcgcggtagctcacgcctgtaatcctagcactttgggaggccgaggcgggcggatcacgaggtcaggagatcaagaccattctggctaacacgatgaaaccccgtctctactaaaaaatagaaaaaattagctgggtgtggtggcgggcgcctatagtcccagctactcaggaggctgaggcaggagaatggcgtgaacccaggaggcggagcttgcagtgagccgagatcgccccactgcactccagcctgggcgatggagggagactctgtctcaaaaaaaaaaaagaaaagaaaatgacttttaggtgaattcaggacattattctggaatctgactccacagtttccctccaccgtgagtgtcattaaacgccgtgcatttaggatccagtgcaggattttcttatattctgctcaagggtagctgtctttttgttggtttgtttgtttgtttttttgagacggagtctccctctcgcccaggctggagtgcagtggctcgatctcggctcactgtaaagagggtagctgtctgttttatcagctatccccagtgcatgcacaccccaagcagcacctactctccatgccacacccaggacagacgatatgcactctgtctcccaagccttcttggtgcatgtatccaggagcagctgaacacaagagatgaagtcataggcaaccctgaaaactggccattgggacccagcagtggctaacaggcgggtccttccagactctgcaaagcaccacataggttggtttttggccacgtgtgactgggttggtggcagtccccctagagtgtcgtgatgccacgtctgctgctggcctcgtccccatcccctgcctaagtggggcatactcttctagagtggagagggcatggggatgagcctgcaggtctgctgggcccgtgtgcagagccccagacatcagtggatgcctagggcacctggggactgcctgacctgggctgtgatgagatcaacactccctagctaccctgggagctcctcccccacccctgctttctgtcactgccaggtactgcctctcaagcccttgctcttcccagtaagacctgtggaccattccagaagcctctgccagagttccatccaccctcccctgctccaactctaccttctcaatgagctcagcagcctctgcggagggaggtcctcttatcaatgcttgtctgttcccccttcaaccgtctcactaaatatcctcctgctagtcaacacagccaccacccctacctgcaagcgcagaggactgccgtgcacagggatacgttatagagagccaggtgctgtgtgtgtccgtgtgtgcaggtgtgtgcgaataggagggcgtatgcacgtgtgtgcatgtgcctgtgtggccatggaagggtgaaggtgggtaggcgacattcgcctctgtgcctggtcccagaagagcgggccctccccgccagaactgacgattccatgcgccttgcaggtactttaactgcagctcccccggggtgcaggcctgcagccttcccgcctcctgctgcatcgacccccgcgaagatggagcctctgtcaacgaccagtgcggcttcggggtcctgcgcctggatgcggacgcagctcagagagtggtgtacctggagggctgcggcccgccgctccggcggtggctgcgcgcgaacctggctgcctcgggcggctacgcaatcgcggtggtgctgctgcagggcgcggagctcctgctggccgcccggctactcggggccctcgctgcccgcaggggggcggcgtacggccccggagcgcgcggggaggaccgcgctggcccccagagccccagccccggcgccccgcccgctgccaagcccgcccggggctgagcgcacgccccgaggtccgagaccgccacgcacagggatacagggggcgcctccgcccggctaaaaagcgcggcctgcgccgccgccgccgcctgatttcgctcgggcttcgggtgacttcgccgcaggacctacccagctcgctcacttcgctcgctccgcgtcccccatgccagcccccaacgcagggcgcccggcgaagccacgggactggcgggaggagcacgcggggccggaggaaatcctgaagctgaccctcacctccgagcccccactcccaccccagccgcacagttcccacctcctggcacctccctcccctggggccgccaccccttctgggctcgtgatggtggagctaaggtccaggcctctccctcccgagtgcatttttggggagatagtaaatgttttattcgggtgtatcattcatacagtaaagacaccaatcttcagaggcagcgtagggaattcttacccatcgaagaccgtgaaccaccgcaggtccgatcggggagttccagcccctggcggcgcgctcaaccccaagtcagccctgcactgactacattgccagggccagcggggcctgtttcgggctttcacataagcggaatcccagagggtctgtggggagtcagatctggcccttgctgcgaatggactggtccatgtgaacagggggctactgtgagggcccctgctgctgggccagcttgcagagctcttgcttcccctggatgtggtgtcaggagtgggatcttggttacaaatgggcatgtttgtttttgttgttttcttttgagacagggtctcgctctgtcacccaggctgaagtgcagtggcagggtctcagctcactgcagcctccgcctccctagctcaagcaatctcccaccttagcctcctgagtagctggaactacaggggcccgccaccacgcccagacaattttttgtattttttttatttttattttttgagatggagtttcgctcttgttgcccaggctggagggcaatggcacgatcttggctcaccacaacctctgcctcccaggttcaagtgattgtcctgccttagcgtcccaagtagctgggattacaggcatgggccaccatgcctggctaatttgtatttttagtagagacagagtttctccatgttggtcaggctggtctcgaactcctgagctcaaatgatctgtccactttggcctcccaaagtgctgggattacaggtgtgagccacggtgcccagcctcattattgttattttctttttttttgtttgtttgtttgttttattttttgagacggagtctcgctctgtcacccaggctggagtgcaggggcacgatctcggctcactgcaaactccgtctcctgggttcacgccattctcctgcctcagcttcccaagtagctgggactacaggcgcctgccgccacgcctggctatttttttttttttttttttttgtatttttagtagagacggggtttcaccgcgttatccaggatggtctcgatctcctgacctcgtgatctgcctgcctcagcctcccaaagtgctgggattataggcgtgagccaccgcacccagcctattgttattttcaaatacagacagggtcttgctatgttgcccaggctggtcttgaactcctggactgcagtgatcctcccgccttggcctcctaaagtgctgagattataggcatgagccactgtgcccagatacagccagttttagtgggcactgtctaaggacgagctggctgggtgctctgggggagttgctagtgtcactgtgcctcagtttctctcttgtgaggtgggagtaggagctccggcctcacggcgtgtggtgtaagccatgtccagtctcaccttctctgtgtggcctgttccagccacctgcatgcttcattgactatggcccctgggtgtgcaccaaggccttctgccttgacccagccatggcctgacattgcgtgtcttggggccaccagcaaggctcagtgagagtgtgagcccaagggctgtcttcccactcaggcaggccagcccctcctgccccactgcccaccccttcccccatgtgctccggctcaagtgaccccaccacaggccctgtcccatgcacaaatatgccacagacaggcaaggacacactaattttattttgaaatagggactgcaagggcaggctgtattgagaaggatggccccctggtgtgatgagcttggggcctcatctgctcaccgtgcacgccctggagtcctgctacccagcatgtccaaactaagggcacccccctgggaagggatgcagagacggggagcttctctgtatccccttacaggcaggacagggggctggggtgcagaagcactctggggagacctgccctagctttccagctgggaggaggggacgatctggggtccagcaggctcccgggctggggtccacttcccgttctccctgggagtggagaccgaccaagcctctctgtgggcaggactgaggggtgggcctgtatctccagatgttgagcagggcctggccagcccctgagggggcatcctagagggaggtggtgggctcctggtgactggtattaatatgtagggggagacctgaggttgcagtcccatcctggtgtccaggtgccatctgggctagggaggcatctcctcaacaggaatcctgagcagggtttagagcacagtgggcaggagggggagggtctggacttcagcagggcctcgtgctagatgatgccatattgggccagctcgtgcagctccaggtggttgaaggcctcccaagggcagatgactgtgatgtctgtgggagaaacgggccacggatcagagaggatcccacggcctagggacccccccatcccctgtggccctgtttcccacagcccaggtgtagccctacagtgtgctgagcggggacgtgcggacgctggagtggggccctcctctggggacacactggctgtgggggaaggagggtgggtgcagcaggtccaggggagggaaccagaggagggtggggcttgctgaagggggaggaggcagcgaggggttctgttctttcccaaacccctcccctcacctggtgcaagtgtcccaaatggggacagccccaccctctagatccagtggatctggagctcagtgttgggggaagaagtgatggacaggctgggggtccctaagtgaaaagcaggggaggtgggggccgaggtgggctgcaatgggccccgggcgtgctgggtgtgcctggggggacctgggcagacctcgggttggtactggcagccgtcatacctgttcccaggccttccattccagggatgtcgtccccaaacctgcaaggacagagcactcagggacatggccgggcccagtcctggctcagtcagcctgaggcccgaggtcatctctagccttcctaggagatgaggtgtttggctgggagcccagtgggcagagacccgcctcctccccaacctcccagggcttggcgcatctgaggaggcttccctcacagacccagggtgagtctgctgcccagagcatcatggggctgaggcctagaaaaggaggtgcaagtcccaggatgctgggcaggtgcgtgccctgggggagtacgggggggtgcgtggttggtgcatggtctgagtgtagatttgtgaaggtggcttgtctgtgagtgtgcctcacgtgcatatgtggaggtgtgagcgtgtttgtgcataagagtgtcatgcccgtgtgtgcgcacacgtgtgagtggacactcctcggtgcgttgatgggagcgcggtgcctgtgtgcgcacacgagtgagtggacactcctcggtgcactgatgggagcgagatgcccgtgtgtgcgcatgtgtgagtggacactcctcggtgcattgtgccatggctgtccctgggtggcagtggttgtattttttttatttatttgagacggagtctcactctgtcgcccaggctggagtgcagtggcgtgatctcggctcaccgcaagctctgcctcccgggttcacaccattctcctgcctcagcctcccgagtagctgggactacaggcgcccgccaccacgcccggctaattttttgtattttttagtagagacagggtttcaccttcttagccagaatggtctcgatctcctgacctcgtgatccgcccgcctcggcctcccaaagtgctgggattacaggcatgagccaccgcccccggccgttttgtttttttgagacggagttttgttcttcttgttgcccagcctggagtgcaatggcgcgatctcagctcaccacaacctctgcctcctggattcaagcgattctcctgcctcagcctcctgagtagctgggattacaggcgtgcaccaccacgcctggctaaatttgtatttttagtagagacaggtttctccatgtttgtcaggctggtctcaaactcgcgatcctagggggctactttggcaggtattaaaacttttttttaggccgggcgcgacctcaggtgatctgcccacctcagcctcccaaagcgctgagccaccgcgcctggccggcagtggctgtattttcaagcatggttggcagtagcatctggagcgggtgacaggagcccccaattccccttccccctcctccatccctgctcaggccctcaggcaccgccctaccttccccagctgtgaggctgggaccactcacccagtgaagtggccccaggctctgccccgccctccccttcctgtgcagcctcaggaccgcctcctccctttcagaggccccatcccccagctctgcttacccttgaacgcctttctttgggggcttgctcttgaactgcctggtctgtcgctgcttaaatttagggggccctttcctgggggtgacaggtcccccggccaccctggtggctgaccggaactcagccttgggcggttccaggttcatggtgaggctgacggagacaccgcggcaaccttggctcctggactccctcctgctgcggtctgggggcagaccaggcccgggtcccagtcagccctcctgcttccaacccttgtgggggtctcaacccaccggtggaggggctgagacccagccccgccagctccagcgtcatccagacagcagcccctgcaatccgccctggggtaaccagcctgccagctttgcttgggtccacccgcacgctcccattccccttgcctagtggatgcccccctgcaacgctggccacacacagctccggactcccccctgtcctggcctccctcgccccggcccacaatccacagcaaacctagcctcccaacctgtggcaggtcctgagcctggagtcctcaccacctccctgtgggtgaccactgacaacttcctgccccttcccctgcgttccccaccccagggaagcgtgactcccgtcggcatttaactgctactctgggtttttttttgttttgttttgtttttgagacagagttttgctcttgttgcctgggctggagtgcagtggcactatctcggctcactgcaacctccgcctcccgggttcaagtgattctcctgcctcagcctccccagcagctgggattaccggcgtctgccaccatgcccggctaatctttgcatttttgcatttttagtagagacggggtttcaccatgttgacgaggttgtctcgaactcctgacctcatgatccacccgcctcagcctcccaaagtgctggtattacaggcgtgagccaccgcacccggcccagctgctactctgatgaaagtcctctgtggctcctgctgggaatgggcctgccaggcccagcagaggagcctgcctctgagctgcccttcctgatggttagtgggctgcctccatctcaagttcccgctcagggaggtctcccctgaacccccgccctgcagccactgtgtccttaggttctgatttgccgcttctcatcacgcgtcgagttagccctgattccaggctggtgggcgtctcccgggctgttgccctctgattcttttttttttttttttttgagacagagtcttgctctgtcacccaggttggagtgcagtggcgagatcttggctcactgcaacttctgcctcccgggttcaagtaattctcctgcctcagcctccggagtagctcagattacaggcatgcgccaccacacccagctaatttttctttgtgtttttagtacagatggggtttcaccatcttggtcaggctggtctcaaactcctgaccttgtgatccacccgcctcggcctcccaaagtgcagggattacaggcgtgagccaccgcgcccggcctaaaaaagttttaatacctgccaaagtagccccctaggatcctattccagagctgtggctggaatctcaccttttttttttttttagacggagtctcgctctgttgcccaggctagagtgcagtggcacgatctcagctcactgcaagctccacctcctgggttcacgtcattctcctgcctcagcctccccagtagctgggactacaggcgcccgacaccacgcccggctaatttatttttttttttgtattttttagtagagatggagtttcaccatgttagccaggatggtctcgatctcctgacctcgtgatccacccaccttggcctcccaaagtgctgggattacaggcgtgagccactgcgcccggccaacccctctgattcttattgatgggtttattgctttctgcctcttgtctgtgctttgcagttggggtgctgtcagttcccttcacccactcacggaggcatccctgagcccctcagcaccatgacgggcaccccgcagtgctgatggagaatgacccacaaaatggggggcagggtccccaggcacggcgcccctgggaaaggggcctgtctcagagacttggtgctgagctgtgaagccctgcgttccccaaccccacttcatagagggacaagctggggcttggggacggagggtgccgggcatgtgttccccctgctgggggaatcaccaggccctctctgtgtctggagtcagctcggggagcagggtcacccgcctggcgtggcgtggcgtggctgaagggcctcggccgctctggacgagatcagtgtccctgcactgctgcacagggtggcctctcctcctcctctccctacagcctctccccagatgccctaagccccagtgacctgggccaagggcagttcagcttcccctaagcctattaacagcagaggggaattcctaatctcccatcgagctgctgtcagctgcacatgctgccggaaagttctggaaggaggcacatgacacagacaggaggggctgcttgcccgcactggatgccccagggaccacctcttggggtcccctttcctgcccctggtctttttggctgggattcctgactccagccctgggctactaccagctgtttgccgagcttcaggcgtgagagtgatcagaaagcaagggcaggtggcccattttggggacgcgggctctgcaaggggtgctgggcacctgggattggggtggaccctgccatggcaccttccctcactaaggttcagcctctgtccccgggactgggaccagcaccagcctgtgcaaaaccagcactcaggagcccggtggtcccagctgctcagatcccatggcacccaatcctcatatcctagatagcacaggccccgtccagctgcttctccagccctgggacatgggctgtcctgggcagctctgggccctgatggagctccaaccatcagatgccatccatgtggaaaccgctgcctgcgctgccctggcccgacccagcctgtgactggcgtccactcaggtcagctgagcccacgtggcctgaggttcccagaccatcactggcctggggatggtggaagcactggttaccatgggggagcagaggaggaggttggctgggagtcccctctgaataacagggtggcgggtaggcatctgcagacccagacctcagccacggtggtaaaagcctgtcagctccctctgccccttgggtgatgagcagacccccactgactcactgggggaagtggctgccaggaaagacagcggggttggccactactcaccaagtgcagggcgggtctcagggggctgtgctgtgagtgctgggcctccctccgcagggtgccagccccggcctttatctcgctgcttcatgagctgattaggcgtctcagtgccaccctaatgagattgttgggccccgagggggggcacaaccaccaaggttcaggggatggagaggaggggctcaggtgctgtcaagggctccaaggaaggacacccagcagatggggccgggacagggagagaagtgtgaccctgaacagccaggctcctgcagctgcccatcttccagatggaagcaaccacagtgtctgctgtcttgggcctccctactgcctttcctgaccctgcctgatctctgaagggcccaccttcatggtccccaaaaccctctgcagcctggccctcacccgctgctgtggcctcacatctcacccctcccaccccagggcctttgcacctgctgctcctgaaaccaaacaaggacccccccccgcccttaggggcctgtgggtcttcccaagcacagaagcaaggacaatgttgagttccttcaagggcaagccaggcccccagccagcccagagaaggaaatgagcagccgatccacaggaaggtcacaagaaggtcacaggagcttagaacaacagatggaagccagagtcccgagagtctccacagaagcaaaccatgccatcttagcaggtgctcctcagttgttttccagaaacagggactcccaccaaaggggcgtgctggcacacagacctcacatgagcgggagctgaggactggcctctgaccacccttctcttacctaaatttcttcctgaggggcctggaggaggctatgcccatcctgaggggcctggaggaggccatgcccacaacccagagctaacattctttcctgcggatcccaaagttttagacaaagattcgcttctgcaccaaatcagaaaacctttgaatccacctatgacccgtggtccctggcttcaagatctccttgctatttatggcaaaaccagtgtacaacctccatgtactgatttatgacttgcctgtgacctctgcctctgcacctttaaaaacccataactcaggcctggtgtggtggctcatgcctgtaatcccagcactttgggaggctgaggcaggtggatcacaaggtcaggagatcgagaccatccttgctaacatggtgaaaccccgactctactaaaaatacaaaaaaattagccgggcgtggtggcatgtacctgtaatcccagctacttgggaggctgaggcaggagaatggcgtgaacccgggaggcggagcttgcagtgagccgagatcgcgccaccgcactagagcctgggcgacagagcgagattctgtttcaaatgaataaataaataaataaataaataaataaaaacccataactcggccgggagcagtggctctcaaacagcgctttgggaggctgaggcaggaggatcacttgaggccaggagttcaagaccagcctggacaacatagtgagacccccccatctctacaaaaaatagaaaaaattagctaggtgcagtggctcacttcttattttattatttcatttttgagactgagtctcgctctgttgcccaggctggagtgcagtggcctgatctcggctcactgcaacctctgcctcctgagttcaagtgattctcctgcctcggcctcctgagtagctgggattacaggctcccaccaccacgcccagctaatttttaatatttttagtagagacagggtttcaccatgttagccaggatggtctcaatctcctgacctcgtgatctgcccactttggcctcccgaagtgctgggattacaggtgtgagccaccgtgcctggccacagtggctcacttctatagacccagctacttgggaggctgaggcaggaggatcccttgagcctaggagctcgaggctgcagtgagccatggtcaaaccactccagcctgggggacagagagagaccctatctctgaagaaatatgaaaattttgaaaaattaaaaataaaacctggacgggcatggtggctcacgcctgtaatctcagcactttgggaggccgaggcaggtggattacttgagatcaggagttcaagaccagcctggccaacatggtgaaaccctgtctctactaaaaatacaaaaattagctgggcgtggtggcatgcacctgtagtcccagttactcaggaggctgaggcaggagaatcgcttgaacccaggaggtggaggttgcagtgagctgagattgcaccactgcactccagcctgggcaacagtgagactctgtctcaaaaaataataataaaaatataaatagtaaaataaaataaaatgtatgagtactccttttttggtatcatgtatcacagacaatatacaaagacaatcacatgaaaatacataaagctccaaatagacctaaacaaagaccctatagccttgattgtaaaactctagccatgagactggcaaaaatcactagtccagaaaggacggctggattcaagttatgctgcaataaatggaacaagtcaaaaacctcttgtcccacatggctcaatccctcactcagccccagaggaaacaagattgcaatccatatcttttttttttttttttttttttgagagacaggatctggctctgtcacctaggctggaatgcagaagtgaaatatcggtggctgcaggaattcaaggctgcagagagctattattgtaccattgcactttaacctgggtgacagagcgagacctcaactctgaaatagtaaaataggccaggcatggtggctcatccctgtacttttggaggacgaggtggctggaccacctgaggtcaggagtttgagaccggcctgggcaatatagtgaaaccccatctctactaaaactaaaaaaattagtggggcgtggtggcgggcgcctgtagtcccagctgccagggaggctgcggcaggagaatcatttaaacccgggaggcggaggttgcagtgagctgagatggcgccactgcactccaacctgggcgacagaggaagacttcatctcaaaaataaataaataataaaaaagaaattaaacggtgatgtggaacactctttaaattgtcgttcaccacattttcatatcttcacaataatgcaaaacacagtcacttgcagaaccggttctgatgacttaaataccaggtacaattttagccctctacgtaattgcttggaagttacttatgtttacatgaaatgaaactattaggccgggcacattggctcacgtctgtaatcccagaactttgggaggccaaggtgggcggatcacctgaggtcaggagttggagaccagcctgaccaacatggagaagacctgtctctacaaaaatacaaaattagccgggcgtggtggtgcatgcttgtaatcccagctactcaggaggctgaggcaggagaatcgattgaacccagcaggcagaggttgcagtgagccaagatcgtgccattgcacttcagcctgggcaacaagagcgaaacttcatctcaaaaaaagaaaagaaaaaaagaaaagaaacaaaatgagactattaggctgggcacggtggctcacacctgtaatccagcactttgggaggctgaggcaggtggatcagctgaggccaggtgttcgacaccagcttggccaacatggcgaaaccctgtctctactaaaaatacaaaaaattagccaggcgtggtggcaggtgccttaatcctagctactggggaggctgaggcaggagaattttttgaactcggtaagtggaggttgcagtgagcagagattgtgccattgctctctagcctgggcgacagagactctgtctcaaaacaaaaaaatgaagctattaatacttttctacagcagtaactacacacaggaagaccaagacaagcacaagttaaggaatggagctttcccaaagcggctgtgtataaagactataaactgttttttgtttgttttttgagaacaaacaaactcactgcagccttgacctcctcaggctcaagcaatcctgccacatcagcctcctgagtagctgggactacaggtgctcaccaccacacccggctaatttttgtattttttgtaaagatagagtctcactatgttgcccagggtggtctcaaactcctagactcaagtgatccgcccgtctcagactcccacagtgctaggattacaggcgtgagctgccgtgcccggccggacatacgtagttttttgccatggcttttcttgtgttctctatctacaggctaagcagattctgtgtgctgccctggggtctttaattacttcaagtgctcatgttgaactatgaatatgattgtgtgtgtgattgttttgtttttagagacaggggtctctgccacccaggctggagtgtagtgaggcaatcatgacttacttccgtcttgacttcctggcccaagtgatcctcctgcctcagcctcccaagtaggtgggattacaggcacacaccaccatgcccagctaagtttttaaaaattgttttgtaggctgggcatggtagctcatacctgtaatcacagcactttggaggccaaggcaggagcccaggagtttacgaccaacttgggcaacgtaggaagacccccatctccacatacagacacagacaaaaaacaatgaaccgggcatggtggcacttgcctgtagtcccagctacttggtaggctaagatgggaagatcacttcagccttggcggttgaggctgcagtgagctatgcctgatggtggcaggaggcagtcgaatgcctaggcagatacgggcaggtccccagtgaaaccccaccttcaagccaaagacaaaaagcctgaaagccagccaggcacagtggctcatgcctgtaatcccagcactttggaaggcagaggtgggtggatcacctgaggtcaggagttcgggaccagcctggccaatatggtgaaaccccgtctctactaaaaatacgaaaattagccaggcatgccgggtgcagtggctcacgcctgtaatcccagcactttgggaggctgaggcgggtgaatcacaaggtcaggagttcaagaccaaccctggccaagatggtgaaagcccgttgctactgaaactacaaaaattagccatgcgtggtggtgggtgcctgtaatcccagctacttgggagactgaggcaggagaatcgcttgaacctgggcggcagaggttgcagtgagcccgagattgcgccactgcactccagcctgcgacagagtgagactctgtctcaaaaaaaaaaaaaaaaaaaaaaatcagccgggcatggtggcaggtgcctgtaatcctaggtactcgggaggttgaggcaggagaatcacttaatcccgggaggcagaggttgcagtgagccaagatcgcaccactacactccaacctgggtgacagggcgagactctgtctcaaaaaaaagaaaatctttaaatctacctatgacctggaagccccctcccttcaagttgtccctcctttcctgaccaaaccaatgtacatatgataggtattgattgatgtattatgtctccctaaaaagtataaaagcaacatgtgtccacgttgggcacatgttgccaggacctcctgaggctgtcacaggcatgtcgtcaaccttcgcaaaataacctttccaaacttattgaccactaaagaactcatccctgtaaccaaaacctgcctgttccccaaaaagtattgaaataaaaaataaataaattggccaggcatggtggctcacacctgtaatcctagcacttcaggaggctgaggtgggcagatggcttgaggtcaggagttggagacctgcctgaccaacatggcaaaaccacgtctctactaaaaatataaaaattagccagacgctgtggggcacgcctgtagtcccagctacttgggagactgaggcaggagaatcgcttgaacccgcgaggtggaggttgtggtgagccgagatcgcgccactgcactgcagcctgggccacagagcaaaacttcatctcaaataaatcagtaagtagattcattgaggcctgtctcagatacttttggtttatagctctcactaactaaacaactcatgaaaactaagcagttggccgggcacagtggctcatgcctgcaatcccagcactttacagggccgaggcaagtggattacctgagcctaggagttcaagaccagctgggtgatatggcgaaaccccgtctctagtaaaaatacaaaaaattagctggatgtggtggcacgcgcctgtagtcccagctacttgtgtggctgaggcaggagaatggctttgaacccaggaggcggaggctacagaactaagcagtccgcggacttgctttggggatcctgggtaccaaaaatatggacctgggtctttgggcgacttggtggggagtggcatcccacgagcacaggatgaggaatcttacttcgggaattcttgctgagaaaagtgcgtcggcaaggccgcccagcagagaggaattcattcaccggctcaggttgtcttagataatagggtagctgtagattacatcttaggtgagcagggaggaccacataaggttgcaaatcccacatcctgtacttacacacatgaatctgcaaagattaaaaacccatgtaggtgacattagagaacaggccacttggttatggcaggtttccctgactgccactgagaactgttttctttccttgttttcttagatttcttatggaataatccacattttcaggattgctaaacttaggcatgtcagccttgctaatttttttttttttttaggcggagtctcgctctgtcacccaggctggagtgcagtggcgtgatctcagctcactgcaagctccgcctctcggcttcacgccattcttctgcctcagcctcctgagtagctgggactacaggcgcctgccaccacgcccagctaatttttgtatttttagtagagacagggtttcaccatgttagccaggatggtctcaatctcctgacctcatgatcagcccgccttggcctcccaaagtgctggctttacaggcgtgagccaccgcgcctggccggttttttttttttttctttttgagatagagtcttgctctgtcacccaggctgcagtgtagtggcataatctcagctgactgcaacctctgcctcccaggttcaagcaattctgcctcagcctctcgagtatctgggactacagttgtgtgccaccatgccccactaactttagtatttttttttttgagatggagtcttgcttgctgtcgcccagactggagtgcagtggtgccatctcagctcaccgcaacctccacctctaggttccagcaattctcctgcctcagcctcctgagtaggtgggattataggcacccgccaccgtgcccagctaattactgtaatttcagtagagaaggggtttccccacgtttggccaggctggtctcaaactcctgatctcaggtgatccacccacctaggcctcccaaaatgctgggattacaggcgtgagtcaccacgcctggccacgtcctgctgctcttaccaactcccctgggagctgcggctgaaggagctggaaggactggttccaggtagtgcttgggccactgagggctgatctgcagcccctgccaggctggtggaagggcacccgaggacccctgccagggattgatggcagctggacagatgggcacttccaggctgcctgtgggcttctgtgcctgccaaaggctttgccacagtgactcaatgagatcagatggccttccctctgctgcacgctgagagcaaccagagcaggcctttgccaggacttgggggaaggtgggacctggcctggaaggggcactggggtcactgtcatttgactgttcaacgaaaaggggtcctatttattgagtcagagtttcactctcgtcacctaggctggagtgcagtggcatgacctcagctcactgcaacctctgcctcctgggttcctcagcttcctgagtagctgggattacaggcgcctgccaccacacctggctaatttttgtatttttagtaaagatgggatttcaccatgttggtcaggctggtctccatctcctgacctcatgatctgcccgcctcagcctcccaaagtgctgggattacaggtgtgagccaccacacccggctgggggtcttattttcaccacactcggctgggggtcttattttaccctcatggcagggtgatggctgcaagagctccggaggtgcataatgccgacctggacctgctcgctttgaagatgcaacacaagccttacggacaaccacacaaaagcctcctgttgaggccaaatcagcagccattctggttggcagacatactgccaaaaaaaccacccccaaaacaaaaacctcctgtgaaaccaccatagagaatttatttttttctcaggtgaagtcagtaactaattcttcctattcccgttggacacaaggagtctgtgagggggtgtgaaggaaggaggctgcggctgcgtcctggactccgtcctgcggtagggagtccagcagggatggctcagcctccgcacctggtgtgcagccggatctccatcctgaggaaggccttgaggttctcatcagccacgtgctcctccagggcagccagggcccgctccccaccgtcctggaagtgctgcagcagcctgtccgcgtactccacccacacgcagttggggcagccactcatgcagcagtttgtgggcggctggagctcaggtggcagcgatgccttgggcggcctggtgccgtccgcacctgcttgggagcccacctctacgtggtctgtcccgaattttctgcgcccatcaggggcttgcgctccgggatggtgcctttgaagaaagctgccacctccaggaagcctctggcagcagtccgggctggagaaccggcgagccccctgaggatgcagacaaacatgtgactctccaggaagctggtgaggcccggtctacccccagcagtgaggacatttcagctctcctgtcattgggcaactggctccatgtcctcagctttttcacttcctgtgactttagacatgttatttcacctctctagactcagtttccccactgtgcaatggaagtcatgggtatgacacggtgtgattcacaagaagtgccaggatcagggcctggcgccgggtgtgcactcaagcacatggtggggggtgggggaggcactcgacacctccagctaagatggctgctctgtggacaccagtatgcgagaggtgtaaccctgtaagctcctggccagcccagcacctctaccagtataaccaagccccaccacctctgagggaccaaccggaagaatcgcaccaccctttatccaagtttccctgtcacaaagcccaggcctctcaggcccctctcatcccagcgtgaatgtcctataggcagtcttccgtcgctgccctgctctatctacccaggatcacggactgacacgctaccaacttcacttatttaactagtcctgcgaggggcatcatccgctccatgtccacggccagtccccagagcccaggagggctcgcacacaggcgctcggcagatactgagaaacaggaaagtggccgttcaccgggctgcttcctctcccaaggctaagcggcccctccacagattccggggcggggactcggtaagagccgatggaggagaggagcgaggggtccttcggcggcggccagcgcgcgatcctcccggctccgtccccacatgcgggtggaggggccggggctcctcccggtacgtgcgggcccccggacagcggcctctcggacgtgcccttcggcgctgccaagacccgtcctggtacttgccgagccacggaccgcggcggctaccgcccggcctccctcgaccaccctccgcagcagcatcgcccgcggacgggatccggcaacccctgaccgtgagcggcgggcgctccggccaatcccggaccttcaggaagtcgcgccgctccagccagcgtgaggctgagcgcaggaagcggaagtgccgatcggtggggcggaaccatgcaggaaggcggaagtggcttcgctagggagcctcccggcgtggagatggcgggagctggtcgcggagcagcggtgtccagggtgcaggcgggtcctgggagtccccggcgagcgcgggggcggcagcaagtgcagccgctggggaagcagcgcccagccccgtggcccgggcttcgcaggtgactgcgctgccccgcgaggccgccacacttccccagagaaggggacgccttgaaggctccgcccgggaccccctagggagcgttcgctcggaccccttccccaggtcgggctcagtgccctcctctgtctgtgcccgcggcccacgctccgccaggatcggttgaatgaatggaggcgcgagcgagtccttggttttgcctttcccgcgtcccagtgtcccgtctttgtggttctggacgaggtcagggcggaaaggcctcctgggctttcggagtgcctttcggcctcgcgtcccgtgaggaaggggttcagggacagccactgagtgagaccgagaggaaagatccctgctccctggactgctggaccggctcgcaccacagaagccagatgtggcccctgtatagatagattctttttttttttttttttttgagacggagtctcactctgtcgcccaggctggagtgtggagtgcagtggcgcgatctcggctcactgcaagctccgcctcccgggttcacgccattctcctgcctcagcctcccgagtagctgggactacaggcgcccgccaccacgcccggcaaattttttgtatttttagtagagacggggtttcactgtgttagtcaggatggtctcgatctcctgacctcgtgatccgcccatctcggcctcccaaagtgcagggattacaggcgtgagccaccaagcccggccagcccgtgtagattctattgccagacccaactattgtttctcttactgattctgcttgtgctttacttgggacgggtctcacccccgtgttctttctcccagcaaagagaagaagaaagtgaactgcaagcccaagaaccaggacgaacaggagattcctttccggctccgggagattatgaggagccgccaagagatgaaaaacccgatcagtaacaagaagaggaagaaagcaggtgtgtgcaggcccatactgggcggcagtgaagctttgtgtgtctcaacccgcccaatcgcccaaatacttcagaacgtttcaggcagaggaaatatgccaagacccggtgctcagaaggtgggggagcgtggccaaagctaaagcagtggctggcagctggtggcgctgtggttccagacgaggcttggaaggaggctgtggggtgggcggggaggacccgttatggggcctcaggatccatgctaaggagcggcgtttttttctccccaaaagtagcgaagattcatcagagtttttagcagggcacggccaattcatgtttactctaagcaaaaaaagggtcaccgagcgatgatggagtgagggagagtggacctggcaactggcggggctactgccagggagaagccatgattcttgggacaagagtgctgaagcaatggtagagagaagtgggtggagtcaggagctgaaggaggaaattccatcaggcccctctgagaagtcttgccttcctcccccaagtctgggtagggtgtccacatgtccaccgctgcaacccagaggtaacactctgggcatgttgggaaacggagtccactgtgtgtatattttgcttatagacacatttctcttcccaaacgtggcactggttttacagcaaagctgttttataatttgtgtataaactgtaggcttcttgttgggggttatatggctgccaaagggatagtgagatagaggtgaggaaggtgcagggaggaggcgcactggcctgggtagcacatggcacgttctgaaccgtgctgcattgaattggcacctttgtttgtttgtttatttatttatttattgagatggagtcttgcttcctcgcccaggctggagtgcagtggcgtgatctgggctcactgcaacctccacctcctgggtttaagcagttctcctgcctcagccgcctgagtagctgggattacaggtaacgcaccaccatacccagctaattttttgtgtgtggtttttttttttttttttgagacagtctccctctagcccaggctagagtgcagtggcacaatctcagctcactgctacctctgcctcccctgtcccagttccagtgcaagcaattctcctgcctcagcctcccgagtagctgagattacaggcacacgccaccaagcccagctaatttttgtattgttagtagagacgaggtttcaccatgttggccaggctggttttgaactcctgacctcaagtgatttccccacctcagcctcccaaagtgctgggattacaggtgtgagccactgtgcctggcctttttttttttggagacagaatatcggctcactgcaacctccaccttccaggttcaagcaagtcttgtgcctcagcccccccagtagctgggattacaggcctgtgccaccatgcccggctcgtttttgtatttttagtaaaggctgggttttgccatgttggccagtctggtttcgaactctggcctcaggtgatccgcccacctcagcctcccaaagtgctgggattacaggtgtgaaccaccatgcctggcaatatgcatgtcttcacatatttatgaacacaaccacctgcctggcactgtccgcctcctgtgttctacactcgcccggggtcctgcgcttgcgttctcagtggatgtcataggtctgcccacgtttcttttttgagatggagtctcgctcagtcgcccaggctggagtgcagtggcgcaatctcggctcactgcaagctccgcctcccgggttcacgccattctcctgcctcagcctcccgagtagttgggactacaggcgcccaccaccatgcccagttaattttttctgtgtttttagtagagacagggtttcaccgtgttagccaggatggtctgaatctcctgaccttgtgatctgcccatcttggcctcccaaagtgctgggattacaggcatgagccaccgcgcccggcaggtctgcccacgtttctctgtgtagctccactgggcttctttcggcagctgtgcaatggagtctgtgggtgatcagaggagaattcattcaaccagccacctaggggtggacattaggttgtttctgctttcctttttcagctgtgctgcagtggacatctgtgacaggtgccattgggctggggggtcacgtccccggggatgccgggccgggcattctacatcctcttcagctgctgtcgttggggtgcttccagccagcctggtcttcccttcctgtggctttgggaggggaaatgagcatgggtcacctgcctgccactgtctgcctcctgcctcctctgaggcctccctttgtcctcagcccaggtgaccttcagaaagacattggagaaggaagcaaagggagaggagcccgacatcgcagtccccaagttcaaacagaggaagggggagtctgacggggcctatatccaccgcatgcagcaagaggcccagcatgtgctgttcctcagcaagaaccaggccatccggcagccagaggtgcaggcagctcccaaggagaagtctgagcagaaaaaagcaaaaaaagcgtgagtggaggcgggagggggaggggtctgccctgggagccggagggaagacattgggttcccatgacggccctctgcaggtaccctgtttcatagccatggggcagcctggattcagggagaccaagccagagccctgggagttggcgagtcggagcatccagctgggagccagtgagggtgtggcctccaggaggctgcggaacctgggaactctgcggagacctcgcttggtccttgctttcacaggaaaagcaccagaaagccctagccctgtgggaatcagccctgagggggtcggtctgagggtgacgtgcccaggggttctgtttccattagaacagaatgtctctcgtccaagagactacaccttcctaattctctaaaagctttggccgagtacagtggctcacgcctgtaatcccagcactttgggaggctgaggcaggtggatcacgaggtcaggagatcgagaccatcctagccaacacggtgaaaccttgtctctaataaaatacaaaaaaaaaaattagccgggcgtggtggtgcatgcctgtaattccagatacttgggagcctgaggcagtggaatcgcttgaatccgggaggcagaggttgcagtgagctgagatcgtgccgctgcactccagcctggtgacagagcgagactccatctcaaaaaaaagaaaaaaaaaaaaaagctttgaaggtttgagaggttgctttcagctctgtagattccctgtttctggattgttgtattacttatagttaccttagccagtgaaagttcatcacagagaacgtggcccagatacagcctggcgccacggtgatctccagagctgtcgctgaaggtgaagcttccagattcacattgagggagacgtgatatacaatgcttgttaggccctttagacacagcagcaccggatgggctggatgagtctctgttgggtggtctttggcagccttcccagccttcgtgcacaaggtgccagtagcccttgcccacgtgtctgcacacattgtcagatgttccctggcaggtagctgtccccagctgagaaccactgggggacctgtgaggggcctgttggggtcagagccttctttggtgggcagctgtgggttttggggtggtaaggggagcggggacttggaggcagccacctgttcttgggtccctgctctgccacaggggatcccttgtgggtggggcggcctctgcctcctccctgggtggaaagagaatttaggaatctgagtgacatgtgctttcttccccaggttccagaagcggcgactagataaagtccgacggaaaaaggaggaaaaggcggcagacaggctggagcaggagttgctccgaggtagctcttcccaaagcgatggtgtcagcagtggtccgggtggggcctgggcgcaggccttctgttccccaccagccctggctgcactgggcacctgtggtttcccctggggtccacagccattagaccactggatgagttggtgttctgtcccagccctatgggagggaggtgggcgggtggtggctctgggtgtcaggggtgcagtggctgtgggcagcagtcctcagttgtattctgctcctccagacacggtgaagtttggtgaggttgtcctgcagcccccagagctgactgccaggccccagaggagcgtaagcaaggaccaggtaagtggggcacggggacaacttgagtttgtcccccagtgctgccagggaacagaagccttggacaggctggacacggtgggtcacacctgtaatcccagcacattgggaggccaaggcaggcggattgcttgagcccaggagttgataccagcctggacaacatagcgagatcctgtgtcaagaaaaaaaaaaaccctcagccaacgtgtgcgctgtctggtgtgtggcctgagagtgcagtgttctcgctggcgggagagctgttgaagctgtgaggctttctgttgcatcccctcctttcccagcctgtgcctcaccctcccctctctccctcagcctggcaggagatcgcagatgctgcggatgcttctgagccccggtggtgtgtcccagcctctgaccgcctccctggcccgccagcggattgtggaggaggagagagagcgggccgtgcaggcctacagagcgttgaagcagcggcagcagcagctgcacggggagcgaccccacctcacttcccggaagaagccagagccgcagctgtgatggagagacacccggggcctggccacgctctggggcaactggcaccaggagctgctacacctgggtaggagagaggcaggccatgccagcagtgtggggtgaggcctccagctacttgttcacacgttgggcactagtgggtccacatcttgcagggggtgagtgcccgatggactagggccaaggcctggttgacagacggcccgtggggcccggtgtcactcacagctccatctctttgttttgaacgtccattctgagtctcagcccaggtggaccttaggaagggctggatccctgtccctgaacaccaaataccgagacagctgatgaggctggctcagtgtgtgacggaggcccccgggagtcagcagagccgagcgtacagtgcacatcaggcagagcaggccacgggcagggacgacgcatcgggacagggctctgcaggggaccgtgactacaggccagctgtgagtggtcccctacagaggctgcccacccaaggtttggttggggtgaaacatgatgacaacacatacacttaagaaggtgggaaccgggggccgggcgcggtggctcacacctgtaatgccagcactttgggcagctgaggcgagtggatcacctgaggtcaggagttcgaaccagcctggccaacatggtgaaactgcatctctactaaaaatacacgaagaaaaaaaaaacagtgggaacagagttgtcacctacctaacagggctctgagagagccgggaggcccaaagtggctggaagaaggtaaaggaaaaatcctgtcttgggctcaaggtcacagagtggggcccagggggagttcctgctgagggcagggccttgccaggcttcagtctccagtgccaaaggaggaaatgcccaggctgtcagcatttccagatgagagcagaagggagaagcttaaacccaagtcacacatccagcaatggagtccgacagcccagcaccatctgggaactgagaagcacctctgcccggcccccacaccgtgtggaaagtgaggagcacctctgcctggccgccaccccgtctggcaagtgaggagcgcctctgcccggccgctgtgcaaccttccaagtgtgaagtgacagccttgtgtgtgatgttttctgccttccccaagtttgcactttcgacattaaagtttactttttagttaaaagttttaaattggagaatatatatttaaagtcagggctgttttcctcttatgggcatgtttcccaccttgtgatggacctggcggccccagccctcgcgttgggatgttgtttttgcagcagccagaactcagccccagatcacaagcagcagctggaagggggtggcctttccctgggaaagggctgggacggcagcgggtggcactcccactcgctcaatgcctttggttttgggtgtcagatcggcccgtgtatggctaagcaaagggatcccacagggctgggaaagcgctcatgctctccactgcatccatgattctcaggttttagctgctggaagggaaacccctggtggtttttagggcctctttgttgcccaggctggggtgcagtggcataagcacactgcagcaagttgttgggctcaggcaatcctcccacctcagcctcccaagtacttgggacaacaggtgctcaccaacacacccaaataattttttgtgctttttgtatagatggggtttcgccacgttgcgcaggctggtgtcgaacttatggactcaagggatccgcctgctttggcctcccaaagtgctggggttacaggcgtgagccactgtacttggcattttttttttttttctgaggcagggtcttgctgtcaccttggcaggagtgcagtggcacgctggtctccaagtcttgggctcaagattagcctgccttggcttccctcagtgctggggttccaggagagaccagctcacccctcctactttttttttttttgagatggagttttgctttcgttgcccaggctggagtgcaatggcacaatcttggctcaccacaacctctgcctcccaggttcaagcgattctcctgtctcagcctcccaagtagctgggattacaggcatgcactaccatgcctggctaatttggtattttttagtagacacggggtttctccatgttggtcaggctggtctcaaactcttgacctcaggtgagccgcccgcctctgcctcccaaagtgccgtcctgcttttcttacttatcctttacttctggaatcttcaggaggaggtgatgtgggcatgtcagggtcaatgtttaagaggcgaaggccatggatggacctccctgggccttccgctctccatggggcagtgctgttctctccatataaagggaaaactgaatttgcacaaaatcggggtgctgacaaaaccagtgatcccagatgggtcacctacttgtacacacaggtctcgcagcaccctagttgtcaactttcctacaaagaattttcccagactagccagattttctcccagccaacctatcacacatttattgatgtgattttttttgaagaaaaaaattaatgttataatttcacataccgtataatgctatcctttgattagcgtttagtttgatgggaactccaaactgttaaagaaaattcaggccagctgtggtggcaccatgcctgtggtcccagctactcgggacgctgaaatgggaggttcactcaaacctgagaggtcaaggccgccccaccgtctgggaagtgaggagtacctctgcctggccgctgcaccgtctgggcctgtgagctgtgattgtgcctctgcactccagcctgggctgtaacagagcaagacccccatctctaaaacagaaaagaaaaaaaattcctatccaggtgctacatctgcgctgagaagagtccacgagcagagacgactctgagaacagtggtgtcctcagcagcatcaatttccccagactcaggagagaattgggctctggcatgtgcactgaggggggtccagcatgcctggccccatgtgggcggcaagccacccgggtgccaaggcaagagactgaggacacgagctgttccagtataataaaatataagaatagttataccagacatagatcttagatatgattatatatgaatcatgaatcattagtttatagcaattactctttattccaatattataataatcctcgctctataatcataacctaggaaaagctaggccatacagagataggagctgaggggacatagtgagtgaggtgtgaccagaagacaagagtgcgagccttctgttatgcccagacagggccaccagagggctccttggtctagcggtaacgccagcatctgggaagacgcctgttgacaagcggaccgtggtctagcggtagcgttagtgtcaaggaaaaacacccgctacttagcggaccgggaaagagtctccctttccccaggggagtttagagaagactctactcctccacctcctgtggagggcctgacatcagtcaggctcgcccgcagttatccggaggcctaaccgtctccctgtgatgctgtgcttcagtggtcacgctcctagtccgccttcacgttccatcctgtacacctggctctgccgtttagttagcagtagcaaattagtgaaagtactaaaagtctctgataagcagaaataataatgtaagctgtttctctccttctcctctctctctctctgccttggctgccaggcagggaagggccccctgtccagtggacacgtgacccacgtgaccttacctatcattggagacggctcacattccttacactgcccctttgtcttgtatccaataatatcagtgcagcctggcattcggggccgctaccggtctccacaacttggtggtagtggtcccccaggcccagctgtctttcatctctgtcttgtgtctctatttctacactctctcatctctgcacatggggagagacccaccgaccctgtggggctggtccctacaccccagaacagccgctgagtgcagggaccctaaggttgggtgggggtctgggtgacaaggccaggggagtccccagcacccctcacccaccctgcaggacaccccaattgacactgtgtgccagcgaagtggggacctgatggttttgagaacgtgggttattgaaagtggcctgcagcacacggcctgtcaggagcaggcaaggagggtccttatccacccaccccgagaccgtcctcccgtggcaccatgccacgcctgcatagggctccctggctggaacccacccttgaaaaccgcctgaggaggtgccagagtgtggctgccagctccagaccacgtcggctccacctgcctggaacccagctgccaccagcgctggctgggaacacaggcttgctgttttctccgggtattgggaaacgcgtactcttaggactcattcaggatcagcatgtccagcccaaggattgcttcaggaaaggcactccctcccaactaaaggaacgttccgccaagcaagctgacaagcgcggcccacccacctccagccgggtggccacaggcacctcaggctcctacctccttatattttcatgcctcacagcaaaagtcacggtgggtatttcttttctttttttttttctgagacggagtctcgctctgtagcccaggctggagtgcagtggcaccatctcggttcaccgcaagctccacctcccaggttcacgccattctcctgcctcagcctcccgagtagctgggactacaggcgcctgccaccacgcccagctaatgtttttgtatttttagtagagacagggtttcaccgtgttggccaggtctcgatctcctgaactcgtgatctgcctgcctcggcctccaaaagtgctgggattataggcgtgagccaccgtgcccggccgacacttggccatttcaaccaggctttgctaaagtcctctgaaattgggggactgaaacccaattactgggatcacaagttgcctgtgaaatctgcaaggacctgctgtcagggctcattaaaccccaaagtatggcaccttggcatgcagactactctgacccagaggagactggaaggcctcagaagccaggtctttgtccttccctcctggttcctgcctacttttctgccgcaaagtgagtcccagaaaccacaattctttttctcacagcaggtcatagaaactagaactcctctctcccaaagccagccataaaacctagcaaggtcactccctcctccctggaagaccctcattcccgaggggtcctgccctatcctcaggggaaggggaattgtgcacagtggccttgctgggtttccccactgtgtccatcaccagttagacggacgttaggccagagcctgtgtgtccaaccacatttctgcatgcctgttcactcgtcaaacctaaatataagaataaaggttttcacgccgggcacggtgtctcacgcctgtaatctcagcactttgggaggccgaggtgggcgcatcacctgaggtcaagacttcatgaccagcttggccaacatggtgaaaccctgtctgtactaaaaatactaaaattagctgggcgtggtggcacacacatgtaatcccagctactcgggaggctgaggcagcagaatcgcttgaacctgggaggcagaggttacagtgagcaaagattgtgccactacactccagcctgggtgacagatcgagactcccatctcaaaaataaataattaataaaggttttccctgggtctttattgctgaaggctcctgcgtcatgtaaaactttacttatttttttttagatggagtctcaatctgtcacccaggctggagtgcagtgcatgatctcagctcactgcaacctccaccttctgggttgaagcgagtctcctgcctcaacctcccaagtagctgggattacaggcaggcaacaccatgacgggttaatttttgtatttttagtcgagaaggggtttcaccatgttgctcaggctggtctcaaacttctggcctcaagcgatctgcccaccttggccgcccaaagtgttaggattacaggtgtgagcaatcgtgcccggctgtcatgtaaaactaatacatttgctatgcttttaggccgggcatggtggctcatgtctgtaatcccagcattttggggggctgaagcagaaggatcaattgaggcaaggagttcaagaccagcctaggcaacacagcaagaccccgtttctaccaaaaatacaaaaaattagctaggcgtggtggtgcatgcctgtaatcccagctacccaggaggctgaggtgggaggattgactgagcttgggaggttgaggctgcagtgagctgtgatcccaccactgtgctccagtctcggagacagagtgagagcttgcctcaaataattaagtaaatttgttaatgcttttctcttgctcacctgtagtttgttaggtgtgttggctgtcacccttatgggtgaaaaaaggtattgtatctttccgccccatggtactaacaggacagacacctcaggtgtctagtagctgtttggtggtggtaagaggcagggggagcagtgcatggggattcatgtggtgtctaagaaggtggcatccaggccaggcgcagtggggattcatgtggtgtctaagaaggtggcatccaggccaggcgcagtggctcatgcctgtcatcccagcactttgggaggccaaggcaggtgatcacgaggtcaggagttcaagaccagcctggccaagatgatgaaaccatctctactaaaaatacaaaatttagccgggtgcggtggcaggcgcctgtaatcccagctactcaggaggctgaggcaggagaattgcttgaacctgggtggcagaggttgcagtgagtcgccgagattgcaccactacactccagcctgggcgagagtgagactctgtctcaaaaaaaaaaaaaaaaaaggtggcatccaacagggcacaggctgtgtacagttgagagcccatgacacactggaaagcagagactggagcccgagccaccctgaagcacacgccgtgctgcgagcttttcccaggcatcgcacatagccctccacaggaataaagacccatttccccacaagcaaagtgcagcaggtttgtgccacggaggagggtggtgggtgcgaggctccttccatgaccgaaggagcctaggctgccagctgggaaaacatctgtagaaaattcacatctattctcaggactatagggtttcttattcaattgttgtagtcaaatgacggcccctaaaaggtgtgtccaaattataacccctggaacaagcaagagtgaccttgtttggaaaatagggcatttgcagatgtaatgaggaatcatcctggattttcaacgacagatgtccttgtaagagaacacagaggcacaggagagaagctgcgtgaaggtggaggtggaaacaggctttgcaggccacagcccaggggcgccgaggagcaccgcagccactacgcaggcaaggcacggatgctccttcggagcctccagaaggaaactaccctggtgaaagcccagctttggactctggcctccggaactaagagagcaaatttgtgttgttttggcagctgcaggacactgacccgtcaatcaacactcccacaagtggccatggctgagaaccaaagtcaaggaagggcactggggaaccatgggaggcacggccaccatttcctgtgcttcatctgagccccacctggcacacctgtggggcgtttcacggcaatacctgttcactgaacaagtgaaccagtgagaatgctggctcttgtttttttttttttttttgagaccgagttttgctcgtcacccacgctggagtgcaatggcgcgatctcagctcactgcaacctctgccttctaggttcaagcgattctcctgcctcagcctcccgagtagctgggattacaggcataagccaccacgcccagctaattttttgtatttttagtagtgacagggtttcaccatgttggccagtctggtctcgaactcctgatctggtgatctgcctgcctcagcctcccaaagtgctgggattacaggcgtgagccactgcgtccggccaccagcttgtttctaactcgaggcctggctcttactaccacactcacttcacctgcctcatgccgtctgtggcagatgcagggtcagggtaccagcggctcagcaggttggaggttgtgctacagcaagaggccaggtttcagtggcactgtgcagtccatacgccttgggggcagtccagcaggtctccaggaaggaggtgagccaaccccaatagcaccactctaagatacagaacactcggccatctgcaggccctgctcatccagtctggggacaggtttttatttttttatttcttatattttttaagacggagtttcactcttgttgcccaggtgcagtgcaatggcatgatctcgactcactgcaacctccacctcccaggttcaagggattctcctgtctcagcctcccaagtagctgagattacaggcatgcaccagcacacccagctaattttgtatttttagtagagacagggtttctccatgttggtcaggctagtctcgaactcccgacctcaggtgatacacccgcctcggcctctcaaagtgctgggattacaggtgtgagccaccatgcctagcccctggggacacttttttcagaggccagatgtcaacttccatctccacatgcctcagtttacacatcattgcatctcagcacagagccccatcatgtagggttactttgggttattctgcccctgtgagaagaaactattggcagcaaagccatactgccctctgccacctctccccagctcaggccagctgcgcctctgccgtgcagtcaatcgttggctctgtgggtggcctggagccaggccagcacccctgctaagccagtgccttcacgggcgctgatttctgccgtggtgatgttctgcttggcacaagcaatgatgtctggaagcctgattaatgacttcatctcctccgtggacatgtaacagggtaggtcgctggagagaaagaggtgccccatcagagcagtggcagccacacacctgccccggacccccagctgcaccacctccctaccgagccatgcttccggctgtaacccgagggagcccccgcccccgctgtgctccctctcagctcagggacgcgtacattttattgaagagtatcagcaccgatgcttctgcaagttgttctgcagaaaggagacctaagagctgcacacaggatgcagagagctgggtggggtcagaggcgtccatcacaaactggggaaaaagaaaaagacagcagcaatgccccgctgccaaacttcctcccctgggcctcacagacctggcactgggagagcaaaactgcattttttaattaattaatttattttttgagacgaagtctcgctccgagtgcagtggcacgatctcggctcactgaaactccgcctccagggttcagggttcaagtgattctcctgcctcagcctcccaagtaactgggactacagacacccgccaccacgcctggctaattttttgtacttttagtagagacggggtttcaccatgttagtcaggatggtctccatctcctgacctcgtgattcgcccacctcagcttcccaaagtgctgggattacaggagtaagccaccgcgcccggcccaaagtagctttaaacaaagctttgggaacaagcagaagcagagggaatcgagttttatgaagacgacctggtgtcactcgtctctgtcctcatgtggccatcagttctccatactggtatccgcggcacaggccttatcaagatgagaccaaccagaggtacgtataagtccaacataaacacagacgtaccggggagtgacacagagggccaagtctgttctctgcggagcagcagccctgccctcagcaagccctctgtgagctcctaccgggggcctgggagcgcaagcaccagaaaccagacagggtgcccagcaggaagcaacactagctaagacctatttccatgagtagtatagtcactaaataacccaaacccctttctacacacagcaaggttggggactggacgtcacagaaatgtagacacacttccctaaaggaagcccatataggattacaacccaccaggagagaacggcagtttccatagtaactggaccagatggggcccatgcaccccccaagctcccggatggtgatctttctctgtgccacgatgtcagtaagattggtgcccacctataggaaaaaccacgatgcaaaaagaacaatacaaccgctgtcccgttgtgaactcctgaagagcaccgtgcccacaccttacacggtggcctgaaccccgcagacccattctccctaacgcaggaacggcgagcagggaccgacgcccatcagtagctggactcgctgtgggggcgaccagccacaggaagccgttgcgaggggagaggaagtgcccgtggagggcggcaggccccctcatcccgcgccaattatcctcagctcgggccgtcccccgctcccgaaggctggccttaagtcacgacctgacccgctgcgcctcggcgtgcacttagaggagcccggagctcttcgccaagcgcagaactgaccccccgcaactccacccgcgggggcggacacctaccgtgggccgtgtcgggggcggctcccccaggtcgcctttcccatcccgggagctcacctgtgcgaagcggtcaaggacccgagcagctaaagggtgagtccccgccccactccgggtgccccccgcgccccggtcccgtccccgcgcggaaggatatcctgcagccgtttcaccagcagcgtcttcccgacgcccgtggcccccagcaggagacacattccgtgcttcgctccacccggcacccgtagctcggcgccgcggctcaaggcccgcccaccggccactctcattggatagttctcaccttcggacttctcattggttcttagggctcattgttccaagggcgcgtccaattagcgcgcagcgttagcgggagagcggaagaccccgcctcctcgcggctctagggccggcgcggtgacgtgcgcgtgcgcgcactggagggaaaaggcggaagcggaagtcggggggcgcgccagctcgtagcaggggagcgcccgcggcgtcgggtttgggctggaggtcgccatggggcgaggcagcggcaccttcgagcgtctcctaggtaacgcgtccccacccgacggctcggccttggtcagcccgcagcctccgcccggcgctgagtcagcgcggccccgagggcccgaggggcgcggaccggccgccctgcccgcctctccccggcccgctgtcctcccgggttcggagccgccgatcctggaccctcggcgcggccgtggggtcggcgtccgtcgggcgttggcaaatggggctctgcgagggtccgcgcagggcgccaggggcgctcggcgacctcgctcctccgcgggcccgggcattcggccgatttcctcttgaccgacgagcacccggccgagtgggccacaaggcctgagtcatgaaagtgggtgactcagtcggatgttaggctcgcacttgggcttctgacccaaaacactgggcctcgaagggtggagccggcagtgttctctctgggaccttcgagctctcttgggggctgcgggtcccagacccaccttttgttcccacactggcttcgggaagtgcctaatggtttaggaaggcgttttctcacgtttttggaggtgaaagctgatcctatctgagcctcctggaattgacgcgttttgggagggaaacgaatgttgatgtgcacgtgcccagcagcacgtggaaaatgcgtctaatgtttgggggtaggagcttgggtggtcgaatgggctgcccaagcttgcctttttgtcaagtagggttttcaaggagacttcaagtgagacaccttccttgccaagggaaccagcaagcagactgagtatctcagccacacaggtagttcagtgcttcagggatgaatccagaggttaactactgaatcagtatagaaagtggacgtggcttggcttgttagatcgtttctgtatccgggaaaggcgatgtgggcagagctggagctgcccccccagaggggccagttgttggagacagcagtgatgtggtatgatgacaggtatgctggcgagtcctccttggagccccgttctgcccttatttccaaagcacttggcttggagcaaggggcctggagtctacactgcaggcctctctagcccttgcccaagctaaggtcccattgaaaccgggagcatctgggcgaacggggactccaagggacgggtgatagggttctttgttgagaagcagccgagcctgatgtttaagagtgaatcagcctctgtctctggtgagctgtgtgactcacggcagtgccctcgcctctctgctgagtgtctttacctcgctcgcgggttgtgggagggcttggaccagcacctggtgtgctcttacgctgtttgctgcttccctggggaggatggcacttccctgcccatcagcacgctcaggaggattctgtcatgctttttcatttggtccaaatgtctaaaggggaaggagagagtcccccccagctgctgccaagctggggtgctgcacggggcgtccagcaggataacccctccctttcatggcattttctctctcagacaaggcgaccagccagctcctgttggagacagattgggagtccattttgcagatctgcgacctgatccgccaaggggacacacagtgagttagcggggcctgtgccctgatgcggaggagcagccgtgcactaagctgggctcgcttggtgcccgttgggtctccacgacgtagctgaccgtgttaggctcttatgtggagaactgcatgggctacatgctaggattttttgacatcttggaggattaaggggttttctctgtacagcttgcagatacctggttatgtttgtatttgcttcggggttctcaaagactaagatggcagacagacttttttttttaagacggggccttgctttgtcacccaggctgaagtgcagtggcgtgatctcagctcactgcagcccctgcctcccaagctcaaacgatcgtcccacctcaacctcctgagtagctgggactacaggcattcaccatcacgcccggctgattttttgtattttggtagagatgggtttttgccgtaatgcacaggctggtctcagactcctgggctcaagcaatcctcctgccttggcctcccaaagcactgggattacaggcgtgagccactgcacctggcagcagatgagcttttctcatcttagttgctgagactatttttttcccgtttttctctgcttttatcaatgtttccttttcagagcaaaatatgctgtgaattccatcaagaagaaagtcaacgacaagaacccacacgtcgccttgtatgccctggaggtaagcagacccccgtgcctcagtggcccccagggtccctaccccctactagtcacgacagcatgagaagagtttgtcctgtggccttgcccacctccctgggcatacatcaagcaggagagtttccactcagccttgagtgcctgtgtgaacagtgccacctaggagagggtcacgctgagggagagacaggagataggggagggagtgggcaccacttcttcagccggtcctgcgtgagtaaacaccagaaggcggatgtcattgctgtgcttggcagtgagacttggcgtcacggagcggtgctgtgcaggctgctgagtctcagatgtgggttccccactggcctgacgggcctgttgaagggctgctgtcccaccgggttccccaccggccactgacgggcctgtcgaagggctctgctgtcccaccgggttcccctccggccactgacgggcctgtcgaagggctctgctgtcccaccgggttccccaccggccactgacgggcctgtcgaagggctctgctgtcccacagggaggtgggtctgtccgggaggaggaggggccctgccctgaccactggcccaacccttcccttcctgggcatctgcaggtcatggaatctgtggtaaagaactgtggccagacagttcatgatgaggtggccaacaagcagaccatggaggagctgaaggacctgctgaaggtgggtgagacgggggcatgcgggtggccacccaggctggcacctttgcttctccgggtgtttactgggcactgatgacagaacagcaccaggtgtggcggaaaatgtgcaggtgcagatcggtggtccctgcactgcgcaagctcgcactcatgagtcggagagacagggccgtgagccccaatccagggaggtcagggtttagcaggagccggcctggggtgctgtgtctggaggaccaaggtgacagcgaccctggggcctgggggaagcttccgggaggcagggcttgggcacctgctgtcttagggaaggtgagtagatgccactgggtgggcagggcaggtggtggctatcgtgtgtgagagtggctgtggtccggagggcaggctggccacatcccacaggcaggggcctgggagggctctgagcgggggcttgtaagatcggatgtgtctggcggggataagagctgttttggagagcgagggcttcatgctttcctgggcagaggaggaaaagccctccagatccccaggagattgtgccggggacatctgcagggattgtgctggggacacctgcagggactgtgatgtggactgtgatgcagtggggatgctgttgcaggtgtcaaggagaaagagtgtcccatgtagtcaggctgctccccttctgtcccaacctgtgggccagacctgggtctcataggagactccctggactcacacagctgagaacctgcccggggatcccggtggacagccaggcctctcaaaggccctcactggccactttggctggcttcctgtcccgtcctgtcctggctgagaggcggaaggtgccggagtctggccctgcccgaccctggtgctcctgagctccttcagtcaggctgcagatcctgagccggttcgctcctctggggtgaggcagggctgtgaagggaaggcgccgctgaggatgcagaggggttctggaaaggagcttaggctgaggtgcaagtgccccggagcctgcttgcagcagcctctgatcgcacgccgtcctgcacgtcacaccgggacggcgtccccgagagggccgtagacgcgaggccaggctgcgctctaaccgggggagaggatggctgcagggggtctggagcccgctctgaatttggaggcatttctggagcggctgccccccgcgtctccccggctgtgactggaaggaggggcgtggccagagccccgcagtacccctgtgttctcagccccaacaccacgctgccaccgtcaggcctgccgggtcctgcctgttggaggctgacgggaaccggggatcctggggtgggcaggtcccgtggggaaagggagagacagatggtcaggggcacagagacgcggcgttgtttggctccagcaagtagaggcaggcgtgaggtttgaactcagggtctgggaacaggttggtgcatggcccccacgccccactcggggggccctccctggcctctgtgtcagccccatctgctcagaggctgaggtctgccagctgcttcctcacaccgaggcctctggcgcctggagtgtcctgcgaccctcacccccttctccctgcctgcagagacaagtggaggtaaacgtccgtaacaagatcctgtacctgatccaggcctgggcgcatgccttccggaacgagcccaagtacaaggtggtccaggacacctaccagatcatgaaggtggagggtgagtcaggactgaggttgggaccaggttgaggcttggaactgctgggcagtcaggctcaacgggcacagtggcgaggggcctgggaagatgggttgttccctgtgttgggagggaggagggcggtggcctggagccagggaagaccgtgcatgtgagggcgggttcagaccggctcctgcctttctggacccacggcccacgggcaggggcaggcagtgatggcagacaacacacaggtgaaaaggcagcagacagcctgtttcagagtggcaggactcctgggggccgggttgggctgtgcagtcagggaaggcctctgaaggagctgtcccaagtgtcgagactggaacagaagccagagccggcgtgagcaggcaggcagcacccgtgggcagacactcagggttgaggccccagggcagaaaggtggccagcgtgccagaggagagtgcagccgggcctgtgcgccgagggcctccaggctgttgggctggagttcagggttgctgtcagcgcagcaggaggcctctggtgggttttcgtctaggtcgtggctgccaaggtgtgtttcttaagggtccctctcggccattgtggccgtggagaactaggggattgtgtagagagaggtgggggcttcaggatgcatttgggagtcttggctggtgctcagggcccactcagtgagagagaggtgggcatggctgctcacatctgtgcgggttctctgtggccctgagtctgctgaagacgaggctgagagcgtggggaatggggcaggctccaggggtggtgcgtccccgctgcaggagttggacgcttgccctgtggctgcagggtgggcaggaccagtgtggagaacacgggaagaacgcagggggcgctgcacgagctgccttggaccctcaactttggggtggtggatgctggtggtctgtgctcctgtctccttcctggggtgggagctctcctggattttttctggggtcgtgtgtcaagaatagctcaaggtcttgtcctcaggatcagtgggagccctggccagagagcagagggtgagggagccactcagcaggcggggccacgcaggggcctcatgccctgatggagtgggagcagtgtctcaggaagagggcagcagggcctggctcttgtctcccgccacagtgaggacagaggccccatggggacacccaatcttgggggcaggaggctgtctcggtgcccccagacaccttcacttgggtgcacggtcactgctgcgttgcagctgccgagagtgaggaaggggctcccggaagtcttgcaggccaggtgggagcaggcagtgactatggcttcatctctccagggcacgtctttccagaattcaaagagagcgatgccatgtttgctgccgagagagtgagtgtgggcggccgccaggggttctggagtcgggctgctcaggaagcgtgaaggggagtgctgggagcccggcttgtttgagggttggtggctgagctctcgtctgtctgggacctgaggatgcctgtgtgtcctgggcggaggcgtagcagctgtctctgcagggcgaggtggagacgtggcttgagggcctttagagtggctagggggctcgggaaaggaaaacaagcacctttgatgaggaaggaagtcccttcctcaggcctcggcagcttcaccccaggccacgccgctgggaagggccgcccggggcattgctctcgctcgtgctggggtcctctctgggtccgttgccttctgtggggcaggggaggctctgtgcctctggggctggtggggcgggaagcgtgtggtcctgactgctgcccctcctcaggccccagactgggtggacgctgaggaatgccaccgctgcagggtgcagttcggggtgatgacccgtaaggtgagttcccacctggggggctctacagccccggccagacaccaggtcccctgccgtgcacaaggccaccgtccctgctgggcctttccttcctggtgggtggttcaggaggtgagtgcagctcgcagcgggtggcagtgtggcgtcaggagggggacagtgagggcccacgtaagggcctgatgccactgcctgggccgggcccagcctcactctggaattataatgttttaaacctagggctacaggccttgccacagtcactctgctgcttgccagggccgtggggcccccttctctttgtggcttagcccatctggattcttaccctcgaggcatcttcacatcaaaaccccctccaggctggcaaccggcagtgcttggggtttggggtgtcagcagcttccagcacccactgcactcacaaaagctcttgttttatcagcagaattgatgtgtattttttccttgcccttacttttaacttaccttattttccccaaaacggtggctggcgttgagactcccgggagcatgtccaggttccccggccttagggtcttcccaggcacttgttctgcttgtcccttgccttcccccacctgtgaggcccagcttcggcatcgtacggggtggttctgggccgggtggcgcatcagggtcccccagtgcctgtgaccaggcccgcccgccccatcttacagcaccactgccgggcgtgtgggcagatattctgtggaaagtgttcttccaagtactccaccatccccaagtttggcatcgagaaggaggtgcgcgtgtgtgagccctgctacgagcagctgaacaggtgagtccccgccccccatttgggctgcaggtggggcaggctctccaggctgggttttctgtccctcttggccatggtgcctgaggcctgcagaccccagaggaccctcacagcacagcagctggaaggtcaagggaaacccagggtggccgcatgccctcggaccctgccccacactagggcaggtgggtgtgagagacagggcgccgcggctccagggaccgaggctgccccgacaaacctgttgcttgggtttgggtttgggtttgtttgcatttcaactttcggaataaaacttacagaaaagttgcaagagtagcacagagaagctgcggggccgcggccagtgcctcagcggtgggaacctgcggggccgcggccggtgcctcggcggtcggtgttttgtcgcagagtttactctgcctcccctctcctgcgcgtgcgtgtgttcacacaggttttattttgaatttgcatgagtgcagatgtcatgccccttggcactcagatcttcgcctgtgatctctgagagggacagtgctctcatggccacagcagtcactcgggactgcgctgccacccagtgctggcttctgctctgtggtccacgttccatttctgccgtggtcccagcagcgtcgctgtgggtctggcctgggttgcgtgtgtttcgtatgtgggccgtgctccctgcttggttcccttttcctggaacgtgtcactgcctccctgtctcgctccgtggacatttctgggaggtcaggccgtggccacctggccccctgttcaggtctgaggctcccacctgcttaggttcgggaagctcaggagtgaggccatgccctcctcaggacatcccatccaagccagccatgtccggtgatgggccgctgcccggaaagttccttttccttcttgtaactgagaagaacttgccttgagccacgtcaagtcccgtccgtcgcagccactgcccacaagcgtgagtctgctgtgagccagcggctccatggcagggcatcccagcgccattcctgccttcacacacacttgctgccgtttccctgtgctgggggctgtgcaggtctgcctcggtgtggacttttctcttaggaaagagccccaggtcggccgagcacggtggctcatgcctgtaatcccagcactttgggaggctgaggcgggcagatcacgaggccaagagatcaagacaatcctggccaacatggtgaaatcccgtctctactttttaagtattttatacttaaaatttttgtattttatacaaaaattagcgggcttggtggcagatgcctgtagtcccagctactcgggaggctgaggcaggaaaatcacttgaacctgagaggcggagattgcagtgagccaagatggcgccactgcattccagcctgggcgacagagcaagactctatctcaaataaaaaaaaaagaaaagagccccaggtcaaaggtcagcgtgcgtggttggaaattgcgaccatgctgtgagcctgcggcccttggactgcctggggcgccccggaagagcttactgggcatgacagtcactgacctgtttgccccttcttgggtggggcccgtcccacagtggcggtgctgtgtttggtttcccgagtgccgtaggaaggtcttcgcaggccgggctggtgtcctgaatgtccattttcaggagaggaactggggcttaccctgagggactcacccgagcccttgtggctggtgtgatgccctcgagtcctgccctgctctgctctggagtgtggccattcggacacctgtggctgtggaaccactgtcctcactctgtggggacacttagaggagcccgcagaggtgtggttgagagctttggcgggggcagggcggtgtcagcgcatggtgacctgcagcattccttgtgcccacaggaaagcggagggaaaggccacttccaccactgagctgccccccgagtacctgaccagccccctgtctcagcagtcccaggtactcagccccctccgtcccgtgggcacctcttccccggcgccccccctcaccctccccgcttgtcctcagctgccccccaagagggacgagacggccctgcaggaggaggaggagctgcagctggccctggcgctgtcacagtcagaggcggaggagaaggagaggctggtaagccgggtggggcggggcggcctcaggaggggcccagctcccctggatgtgctgcggtggggccggaggggcgtcacgtgcacccaagtgacgccccttctgattctgcctcagagacagaagtccacgtacacttcgtaccccaaggcggagcccatgccctcggcctcctcagcgccccccgccagcagcctgtactcttcacctgtggtgagcggcccttgggctggagctccctctcctggaaggcagtagggttgatgggggacgcgggtccctgagctgatttagtcaggttggtgggggatgcgggtccccgggcttcccagagaggacagccccagcacacgggcggacatcagggcagagccccacggctccaggcacccgttgctcctggtccctggttcggcccttgggactgaggacatgggacaggctgtgggggaggcgccttgctggtgagaccccgtctcttccacacccctcccgccccacaggaactgaaggacttgctttctggggcatccacgtcacctctccctggcctcagccccgctctcagtagagggtgaagaggcagcctgttttgcagggggttgggtcggggacagcaggttgagaaagtcattttgtaggttccgtggagtggccaggccgctgcaggcccaggggtgcagaacagccctgccccagtgagccaccccttcccttcttcccttccttccgggctgtcggctggggccccacacgctggaccgtgggggctgtccagtgtccaccttgaggccccagggctggcccagtgccaccctgttcctcccatagcaaggttaggagccttgtaggacggcagtgctgtcagcctctgtggagttctaagcatctggaagaggagaaaagatggctgctcagatgccaggaaccagaggagggcacggagggagggcccaggctgcggctctggtctccaggatctgtcgcactggggacatccctgtccctgccgaagcaactggctctgtcacctgtgagactcagatgcccttttctccccagaactcgtcggcgcctctggctgaggacatcgaccctgaggtaaggcccagcatggggtgcatcctctcacggtttctggccttgggagtgaccccctcattgcctgcagctcgcacggtatctcaaccggaactactgggagaagaagcaggaggaggctcgcaagagccccacgccatctgcgcccgtgcccctgacggagccggctgcacagcctggggaagggcacgcagcccccaccaacgtggtggaggtgagggggccactcccggcattcctagtggcagggtcccttggaaggggtggatgcgggacaggttggaggccccactcattctctctcttccagaaccccctcccggagacagactctcagcccattcctccctctggtggcccctttagtgaggtaagctgtggctccctccacgggccagggcaaaacatggcctcctggcccacagcgccaggcacatggcacaggtgcctgccctaaccagagggccgtgctagagcaagggtgtctgccccagcccagccctggcctgccctgccctgccctttgtggcctctcccaatggaaactctacaccaggctgtggtccagagctcgggccactctctgtggacctaacatggacctgaatattccagagcagcctagaaccatcagatgagtccttggcgttgcctggggcttgtgggctggttggctgtcagagcacaggtccctggagagggagctggcagtggggccctgagccagctccgtcctgaccagggcttgcagctggacaaggaccccgcctccagggcctcgccttcctcagctgtagaaggggctgcttgcataaggagcagatggactctgctccaggcttgagtatagctgggtgcctccatcccaggccccaccagggaggctggctggggcgtggccgcactcatccagaaccctgctctgcctgcagccacagttccacaatggcgagtctgaggagagccacgagcagttcctgaaggcgctgcagaacgccgtcaccaccttcgtgaaccgcatgaagagtaaccacatgcggggccgcagcatcaccaatgactcggccgtgctctcactcttccagtccatcaacggcatgcacccgcagctgctggagctgctcaaccagctggacgagcgcaggcgtaggtgcccgcgccacggggcctcggctcaggggcagccaggtgttgtgagcgccatcctgggccagggcctcccctgagggtgctgagctcttgtgagtccttcattggggccgtggcttcctccagagagtgtcaacaggaggtggtctcagtgatgaccatgccctgccctgccctgccctgccctgccctgccctgcccaggaccctctgcctgcctcccccagagcccagcaccttcagagccctctgcagaaggttgggcacagggcggcccatctgcgtgtccgttccacccaggagcttctcggcactgtgccggagtggtcagggttgctctgtcatctgcccacagtgtactatgaggggctgcaggacaagctggcacagatccgcgatgcccggggggcgctgagtgccctgcgcgaagagcaccgggagaagcttcgccgggcagccgaggaggcagagcgccagcgccagatccagctggcccagaagctggagataatgcggcagaagaagcaggtgcagtggctgcccagccacaggccggggccggctgggggacctcgcagcataaccagcatgtttttgccgcacaggagtacctggaggtgcagaggcagctggccatccagcgcctgcaggagcaggagaaggagcggcagatgcggctggagcagcagaagcagacggtccagatgcgcgcgcagatgcccgccttccccctgccctacgcccaggcatgtgccatcctcccgccacccagaggcttgtgggctgaggaccaactctcaccgctgtctcttttgtccccagctccaggccatgcccgcagccggaggtgtgctctaccagccctcgggaccagccagcttccccagcaccttcagccctgccggctcggtggagggctccccaatgcacggcgtgtacatgagccagccggcccctgccgctggcccctaccccagcatgcccagcactgcggctggtaaggacgggtcggggcagagaccatgccttttatccctcgtctttattttagccgaatttacagaaaagcagtaagaatggtgcgaagggttttcccagttgccccgatgtgaatgttgtccctgctttttcctgtttccatgcaaacgcactcacacaggctttcctgctggagccgtgtttcagtccgtgcgtggcaggtactgccctctcccctgaatgcgacagcgagcatttcctgaaaccagcaggtgctgggctgccgatcctcgtctgtagcaggctcagccctcatggactgtcccagtggtgtcctgtaaacagcacgccccctgctgcgtggcatttgccccccccccccccgcctttaatctagagtgttccccagtcagcttctgtgttttgtgacatctactgtcccaagagcactggcctgtcattcggcagaccgtcctcagctcaggtttgtctggtgtctccacgcggtgaccataaggctgtgcttttctcagagtggcagccgaggtgacgtgcatcccgtcagtcccattgctggccgttcggctgagacggggtctgccaggggttttcactgtgaagtgactgttttgccctttacagatgtctcttgggggaggccttccaaataccctgggactcctcaaggtctagcattttttgctaatgttgcctgtgtttattacggtgtttgccaaatagcgccttctaattctgctgttgtctttccactggcgggaggtactcttccccactctcctgcttatcgtcagtcacagcagcgtggagacgtgtttattttttctttcaaaggtgacactcctctgtcatcactctttatttttagagtctcgctgtcatccaggctggagtgcagtgccatgatcatggttcactgcagcctcgacctcctgggctcaagcaatcctcccatctcagcctcttgagtagctgggactacaggattgcaccaccatgcctggctaattaaaaaaaaaagggctgggtgcggtggctcacgcctgtagtcccagcacattgggaggctgaggcaggtgggtcatgaggtcaggagttcaagaccagcctgccaggatggtgagaccctgtctctactaaacatacaaacattaggtgggcgtggtggcacgtgcctgtaatcccagctattcgggaggcagaggcagagaatgaattgagcccgggaagtggaggttgcagtgagccgaggttgcaccaccacactctagcctgagcaacagagtgaaactccatctcaaaaaaaatgtagaaatgaggtctttctgtgttgcccaagctgacctcaaactcctgacctcgagtgatccgcccttctcggccttccaaagtgctgggattacaggtgtgagccaccgtgcccagccccgttactttgatgctcaaagtttcccaggtgtggccatgggaggcgtcagtggcttctctgttgcgtagggccattggtttgggttgctcctgagtttctgttgctagatactctgtgctcgtcttgtatgttctcaaccctggaagcagccatttctccaaggagcccttgttccctttagtggagggtggtctggatcttggttagaagccaagatcaagattctgggtgtgctcacagctctaggttgttagcagacagagctggaaagtgtgtatgtgaatacaagtgcacagttgtgggtgcgtctgtgtatgtgcgaatacatgcgtctttgtatatgataaaaaccgtgagtgcagccaggtgcggtggctcatgcctgtaatcccaacactttgggaggccaaggcgcgtggctcacctgaggtcaggagttggagactggcctggccaacatggtgaaaccccgtctactaaaaatacaaaaattagccaggcgtgatggtgcacacctgtaatcccagctacttgggaggctgaggcaagagaatcactggaacctgggaggtggaacttgcagtgagccaagatcatgccattgccctccagcctgggtgacagagcgagactccgtctcaaaaaaaaaaaaaaaatccatgagttaattccagtacttgcaattttaatccaatagcacagttttcttttgcattgttttcaatatactcaattgctcagccctagaatacacaaaaagtagttttaagaatgctaacctggcccactgtggagacgatgcctcctaactggagtgtaacatttgtctgtagttcttgtcatttgtagcctgaggccgtggagtccagattttgggttcagaagttactggaattcactatcccatcccattggtcagaccatgtcactcatttcaaatacagtttggttcattttttctgatttcattccattctaggattctcctcccatccttgttggtttatcttcttttttgagacgaagtctcgctctgtcgcccaggctggagtgcagtggtgcgacgtcagctcacggcattctccgcctcccaggttcaagcaattctcctgcctcagcctcctgcgtagctgggattacaggcgcctgccaccatgcccagctagtttttgtatttttattagagacagggttttactatgttagacagcctggtctcgaactcctgccatcatgatccgcctgcctcggcctcccaaagtgctgggattacaagcatgagccaccacgccccgcctatgttccttttttttagaaacgtgaaacctgaacttggttccaaaagtcacaacaaaaaggaaaactcctggccgggcggtggctcacgcctataatcccagcacttcgggaggccgaggcgggtggatcacctgaggtcaggagtttgacaccagcctgaccaacatggtgaaacccgtctctcctaaaaatacaaaaacttagctgggtgtggtggtgcacgcctgtaatcccagctgctcgggaggctgaggcaggagaattgcttcaacccaggaagcagaggttgcagtgagctgagatcgcgccactgcactccagcctgcgtgacagactatctcaaaaaaaaagtaaaactcggccgggcgcggtggctcacgcctgtaatcccagcactttgggaggccgaggcgggcggatcacaaggtcaggagatcaagacaatcctggccaacatgatgaaaccccatctttattaaaagtacaaaaaaaaattagccgggcgtagtggcgtacgcccgtaatcccagctactcgggaggctgaggcaggagaatcgcttgaacccgggaggcagaggttgcagtgagccaggattgtgccactgcactccagcctggtgacagagcaggactccatctcaaaaaaaaaaaaaaaaaagtaaaactcaagagtagggtgtcccttcctctcctccctgttgccctggctgaaccatctcccctgtcttgtttgtcacagatcccagcatggtgagtgcctacatgtacccagcaggggccactggggcgcaggcggccccccaggcccaggccggacccaccgccagccccgcttactcatcctaccagcctactcccacagcgggctaccaggtacacaggaaggccgctcctctccttccagggccagccccagccccagccccagccccagccccttctcccatggcactcattccctccgcagaacgtggcctcccaggccccacagagcctcccggccatctctcagcctccgcagtccagcaccatgggctacatggggagccagtcagtctccatgggctaccagccttacaacatgcaggtacagtgacctccaggccctgctgggggccagggtgggggagcagttgatgatgctgagggtcctttggtgaggctggcaggcactgggtgggctccaccccttctgctcctccccctccactctctgggtgctccctgtggtcacctttggattgttgcaagccagaaacatccccgcctgcctggtcacagggctactctctcacatctgacgtcttctcacaacagaatctcatgaccaccctcccaagccaggatgcgtctctgccaccccagcagccctacatcgcggggcagcagcccatgtaccagcaggtgagccattcccggggcctcacagcggcacccgcagggcaccctcaggcttcacggtttagcaatgggacccctggccccagtggggattgtcccgtacgtctgctcacagggggagacgcatacccgaggccccttctcagcagacagaacgaggacacaagtctcagggcagatacgcgcatccgcaagtgtagacaggaaaaaccgtgaatttacttgaaaggcaaaggccgcatgagctggctgcatgagctgcagtccgtggacatggattacaagcacttgtgggtctgtggctctgctgggacaaaagccttcctccctgggctggggaagggaggaccagggccatgcctgctttcctcctgcacagatggcaccctctggcggtcccccccagcagcagccccccgtggcccagcaaccgcaggcacaggggccgccggcacagggcagcgaggcccagctcatttcattcgactgacccaggccatgctcacgtccggagtaacactacatacagttcacctgaaacgcctcgtctctaactgccgtcgtcctgcctccctgtcctctactgccggtagtgtcccttctctgcgagtgagggggggccttcaccccaagcccacctcccttgtcctcagcctactgcagtccctgagttagtctctgctttctttccccagggctgggccatggggagggaaggactttctcccaggggaagcccccagccctgtgggtcatggtctgtgagaggtggcaggaatggggaccctcaccccccaagcagcctgtgccctctggccgcactgtgagctggctgtggtgtctgggtgtggcctggggctccctctgcaggggcctctctcggcagccacagccaagggtggaggcttcaggtctccagcttctctgcttctcagctgccatctccagtgccccagaatggtacagcgataataaaatgtatttcagaaagcatcagcgttttttctttaattaatttttttgagatggagtctcactctgtcacccaggctggagtggtgatctccgctcactgcaagctccgcctcctgggttcaagcgattctcgggcctcagcctcccgagtagctggactacaggtgcaccccattaccatgcctggctagtttttgtatttttagtagcgacggtgtttcaccatgttggccaggctggtcgtgaacgcctaacctcaggtgatccacctgcctcgggctcctaaagtgctgggattacaggcatgagccaccgcgcccgacctgcatcaacgtttgctcagggggcaggtggtcaggctgatggcccagctgcaggcagggtcatttccagcctgcccctccctgaggctgcgtgccagggttcatgtgtgccctccgcggctctgcactgaccccgccggtagctggggaggagtttgggcttggcgcctccttcgtgtagtggctgaagcttcccgggtgctcctcattcctgggaagggagtcgggtgatgggaacggtgggagctcagcgctccgagtctgcggccgggggccagcggggctgaaacgcgcctcctgagtgttgaaagcggcaggcgccggcctttgcacccagaggccagggcgtctcactcaccttcacatccaggcctcttaggggagcgcggctttggcttttccaggaaggaatggactccaacggacagggaaagaagaagtgtggagagacgggcaggataagcaggcactgggcccaagccgcccttggaggctctgcctgttctgatctgaaggcggaggctcagccgtgctctcccaggaagccacctgggcgtttggggctttagctaggaaagaggatgtcgcctgcggctgcgaaggcgccaaagcccagacctcgcgcctccgcccgcgacggcggcactgggggcccggagcgggcgggagacgtggattactgcgggcttcggggccctagcctcgaccgcgacgttcgctcgcatcgcgtacggacagaaacccgtgagcgctgaagaaagaacacctgaatccggagccccagcccccgtcgctcgtttgcgcgaccccaaaacctggcgggacgagggtcgcccgatgtctagctgccgccacagacgacgcttttgcgtctgcgcagcgcgccgccttgtgggtaatctcagggtgagacgaggctagcgcgaggtacggctagagcgtcatttccggctcgaatgcccggcagccgtggcggctagagcgttcctccccagctcgaatgcccggcggccgaggcggctagagcgtcgcctcctcccggggaaccgcgtgtgaccttccagcccgcggaccgatgctgccggcggccgctcgccccctgtgggggccttgccttgggcttcgggccgctgcgttccgccttgccaggtacgcgggatcctggggcggtccgggccggcaggcgggttagggggcagccgggcactgaggggtcgatccgggcgaggagggcggcggggccggcctccctgcagcggccaggccgggcttgggggtcccatcgggggcgcggggaggaggcctcccggtgcgcacgccccttccctcctgggccgtggaaagcgccggggtcggccccagatgaccttggacgattccctgctcctcccttggcctcagccttttccgcagcaaaggcccatccgtgggtgcggcgttttgcggccaggggcccccatgttttgggaggctttgcgcaggaagatgcacctaagtaatagtttcgccaccgctgggttgatgtagttcattcaaaccagaaacttgaggtttgagtggtatggctgcaaataaacacgtggctttctaaggctctttgaagaatttaaagtaacttgcaaatcttatcaatacggaccccttgaggtctgagaaccctggactgggaccaaggagctaggtaatttccggccctagtgattaccagcctgagcttatggcacccaccagtcccccagttgtcctgcccctctggtttctgcagccccttccattccaggactgacaagtctgttttaattgggggtgggggctaggcgacaggtgccatgtgtctgtgccgtgcgacatatgaggagcagcggccatcagaggtgtgaggccctcgctggtgcacccctggataacgcccccaaggagtacccccccaagatacagcagctggtccaggacatcgccagcctcactctcttggaaatctcagacctcaacgagctcctgaaggtatcgtgagagggtggcacagacccaggggctggaagtttcagggcccctgtgttttgttcctggtgtattttgggagtttggtaaattgtcaaaagtgtgtttgtccaggtgcaaggtccatgccaggctagttgcccctcctcagtaggttccggctggtgtgagggccagctgtggacactgttctctatctctgcagaaaacgttgaagatccaggatgtcgggcttgtgccgatgggtggtgtgatgtctggggctgtccctgctgcagcagcccaggaggtgagtcctgggcagaatgaggcatttctggggtgcccagttcgcctgtggcctcatgtgccgtggtcccgtatctcaggttctgcagctaccgtcattgtctgcagcctgcacacctgtgcggcatcctgcagcctcctgggacctactccctgccacggatgtgcacgactttgcatgtggagaccatgtttctaatggagggaaacagacactaagctgagagaggaaaaagaggctgggcgtggtggctcacgcctgtaatcccagcgcttcgggaggccgagacgggtggatcacttgaggtcaggagttcgaggccagcctggccaacatggtaaaaccccgtctctactaaaaatacaaaaaaaaaaaaattagctgggcctggtggcacatgcctgtaatcccagctactcgggaggctgaggcaggagaatagcttgaacccgggagactgtctcaaacaaacaaacaaaataaataaataaaaataaaaataaataaataaataaaaatacaaaaattagccggcgtggtggcaggtgcctgtaatcccagctacttgggaggctgaggcaagagaattgcttgaaccagggaggcggaggttgcagtgagccaagatcatactactgccttccaacttggcaacagagcaagaccctgtctcaaaaaaaaaaaaaaaaaaaaaagaggaaaaagaaaggaagaaattataccaaatagaacattgtaagcattgtggggaaaaggagggaagaggctcaaggtgggagggagagttccaagttcaaggtgggcttcaaagaggaggcagacattgtagaagagagcacggccttcctggcggaggacggggaggcaccaaggtcaccaggcaagagggtgtctgacaattcagggagcagcagcgaggtacaggctggcgcaggcgaaggggtgtaacaagcagctccgtccttgggtctttgcaaggaaaccagtgaacttgaagccgccagttgcgtttggtcatcgggttgcgtgaacctctccaccggagccctcccctcagcccctttcccccactggggaaccaggttgtgtactgtagagtgtcccatgttccagatgcgtggggtgcccatggggcagcatcactcatgcctgagaactggaaggtagtttaaaggctgattagattcaggccgagcgtttgggtaagaatagctgggattactgtagagcctgttgtgtaaactggattgcttttgaggagggagaagatgttattaatagccttcccaggccgtggggacacgcagccccctgccctcgggtggtgctgggtctccatgcgccacgtcagaagcgcagcgtgcccgtcagtcccatggcgggttgtcattttctcggcacacgtgcactgcagtgtggctgagaaaggaatggcgctgcttttatctacaaagcacttttggtgtcgttctttcctgtctcataagttacgctttctaagcgagaggggagtagagtattgagggaaggactgtgaagcatgtttttatttatttatgaaaccgagtctcactctgtcacccaggctggagtgcaatggcgcgatctcagcccccgcctcccgggttcaagcaattctcatgccgcagcctcccgagtagctgggattacaggcgcgcaccactagagacagggtttcaccatattggtcaggctggtttcaaacttgacctcaagtgatccacccgccttggcctcccaaagcgctaggatgacaggcgtgagccaccggagccaccactcccgtccgaggcatgttacaaagagttattgggcagacctgcctctgactagcatgagagaaaaagcaccagctggactcgcgaggccaaggcaggagaatcgcttgaacccaggaggtggaggttgcagtgagctgaggtcgcaccactgcactccagcctggatgacagagtgagactccgtctcaaaaaaaagagaaaagaaaagaaaaagcaccagctggttaaggattgatgagttgggagacgtgacttccaactccaggcttcgctggggcctccgctgcacctccctttggggctttagactggggtggcccagcagtggaggcgttagctccccccagccctttgtcacctggctccccttctttcctgctccctaaggcggtggaagaagatatccccatagcgaaagaacggacacatttcaccgtccgcctgaccgaggcgaagcccgtggacaaagtgaagctgatcaaggaaatcaagaactacatccaaggcatcaacctcgtccaggtctgtgccgcggtgggggttccgaggcaggttccgttgtggtggccagggcccccagtccctgactttgctctctctggcaggcaaagaagctggtggagtccctgccccaggaaatcaaagccaatgtcgccaaagctgaggcggagaagatcaaggcggccctggaggcggtgggcggcaccgtggttctggagtagcctccagctcggaggacttgtgttcaggggtcctgggccccgggcgaggtcccgccctcccgtggtcactggctccgcccccagcaccaggcgcccagtggagccgtttgggagaattgcctgcgccacgcagcggggccggacaggccgcacagacctactgtggcgggagggaggggcggctgctgcctggtgacggcacccggaggcccaccaggacgcgccaccggtgaatgtgcctctggtggctgctgagaaaaatacactgtgcagctcagtgtgtggagtgccgtgctcaggccgggctgccgggccagtgcggggatccgggcagcgtgtggagtgcggtgctcaggccgagctgcggggccagtgcggggatcgaggctggtacgggatgggaggcttgttccctgcctcctcagcagacatctgagagtctacagacattcatcaggtccccggtgtgcagggccctgtcctgagaccccacagtgggcctggtggacggcagtggtgtggaggacctgggcagcgggaaccctccctgttttcagtgttggccctctttaaggcaacaggaagttcagcactcgcctgagaaaccgaggcagccttggagccggcgatgccacccctagcttaggctgcaagtacccctgaacctaaacccggccacggggctgcgcagggggattggggaggggtgtgggatgcacctgccatctgcagggttggggtgtcagctgttcctctggggcccttaagtggggtatcctgggacctgggcaaagcggcaggaggggcttgtggacatggggaccgggagtgccgtggtcagcttggagcactggtcactgtgcacttggtgaggtgtggcccagtgctgggcagcccttggcagccactctcgggctgcagaccccttggtgccactgctgagtacagggggtgtggccccatggcctggctggaacggccagggccttgctttgaggacccgtggccgccttttcttgggcacgcctgttttcagccaagcctgggagagaatcagcgaatttctgtctcagctggcccgtgaccaaggccagcccccaggctgtgggcccacaatgaggccagagacaggccatgttccgcacctgcttcgggaaacatgcctggtgtgatggccccgtaggctgccatgccctccagcctcagttttcctggtggaaggatcccttggatgggaccagaaaggggcaccgtgtgtctggaagctgcccactggctgggactcctgggggagcgggaggggcagggagtttcaggctcactgtgcgtgtacaccctgcctggcccaggtcctcttccaaggccttctggtagagtttctctgactaacctgctgtccccaggaaaggctgtcccaagccaagcctggaagtccccattggccatggtatccattttgaggggttaatggtcttccctcaggaggtgacactgccacctggagctgggtgcattctgcctggtgccctgctgaccccaactgcctttcccctctggaaggcagcgaacatctgagctcagggacgagccctgcttgaggtcagacagacatgctgtcttcatccaggctgcacccaggccagatagaccagcaaaatctctgcccgcgactcctcgctgtctaccctggctcaggcgtctgccaggccactcgcaggagccaccgagaggccctttcctccctgccgggggacccccaaaataacctgtggatgccaagcagcaggacactgcggtggatgccaggccgcagtcggaggctggacggggagccctgtcccgtgagcttgctcagtctgccccaaccacccccttgggcctaccgacataacttatgatccgtttgagaatccatcagggatccttgtgagtccccgacctgcagttctagattcatcatttgaaaaagcctctggccctggatgcatttcctgttttcaggattcctcgccttctgactgctctcccagcatctctagctcacggagttcacaaacttcagtcccctacagctccttgcacttttgttctattttttttaatgttttatttacttatttatgtatttatttttatgaaacggtgtcagtttgtcacctgggctggtggtgcagtcttggctcactgcagcctccacctgccgggttcaagcaattgtcctgcctcaccttcccaagaagctggaattacaggcatgcaccaccacgcccagctaattttgtatttttattagtagagatagggtttcaccctgttggccaggctggtcttgaaccttatttttatcttttttaattttaattttttttgagtgagttttgctcttgtcacccaggctggagtgcaatggcacgatcttggctcactgcaacctccacctcccaggttcaagcgattctcctgccttagcctccctagtagctgggattacaggcgcccgccacaacacccagctaatttttgtatttttagtagaggcagcgtttcaccacgttggccaggatggtctcgaattcctaaccccaggtgatcacccacctcggcctcccaaagtgctgggattacaggtgtgagccaccacacctggcctatttttattttttaatatagacacgatctcactctgtcacccgagctggagtgcagtggcctgatcaaggctcactgcagcctcagcctcctgtgcacaagcaatcgtcctacctcatcctcccaggtagctgggactataggcacgtgccatcatgcctggctaatcttttgattttttttagagatgtggtctcactgtgttgcgcaggctggtctgaaacgcctggcctcaagagatcctcctaccttggcctcccaaagtgctgggattacaggtgagagctgccctgcccagccttttttgttctttgtaaagctcttcagttcctgctccttacccgctgggccctgctctttctgctttggagcagttcttccttcagcagggagccagtgttctgtgggttggggggtctctgccagcagccagtttcagccctgtcttgcaggtggccttcggagggacaggttgcagcccaggcccgcccccctccttcctggagtgtctcacagactcaggggacactggccctccaggccctgcttcccccaaggtttccatccatcgcctcttgattcttggtaatcgggagccgatggatgcaactcatctcggtttacactgagtgagacaggcgctgtgggcacagccaagtctgcgggactcagtcaggtgtgagcctggatggccccggacaaggaagcctgtcctcttgctgggaaatttccgttaagatcgggccacttcccctgcttcctaacggttgagtctgtttgctctgggccttttaagcccagcgtgatccctctgagtccctgcggtgcatttgcgccatctccacgcttcctgttgagccccagcccaggcttggtgcgggcagtgctgcactgcactctcctggttgcctcctgagcacctccacccgcttccccaccaggcgtggctgtgttttcacccccagtgtccatctggcacccttctcgattgccaggtagttacggtctgtgtgggcaacacctgagggacccaaccaaaccaaggtccaggacacacttccgggcaggggtaccgcctctggttagctgctcactccccagcccaaatcttccgctgatgacttctggggtcagaggccacctaagggtctagaaaacagtctcctccagttggctacctgcctacgttggggttacggcccaataaacccacagccaagctgaaaatcctaagtgtgcgtcttgcgcttccgacacagccagggcatcgctggatgcgcagaggcagggctggacacattctggtgcttgaggggttccagggaccacgagttgtttttccggtgctcctcacccttcgccctggagggtgggggaggccggacagcagtgaccaagctggagctgcaggtcttcatccctgtggcccagccctaaagcagccttggggacttaaatttcattttgcccagcaggtgcacctgggccaggaacacaccagcgcctccttgttcttcgcagggaagtggaatccaagcaggggcccagatgcaggcaggcatctcctgggaacaagagccccagaatccaccccggggccccacttccagggtggttgcctggggcgtctggtcagagccagaccagaactgagcaggagcttccgggcatctgtgtgtgggaagggagaggcaagtccttcctaaccgccttttttcccagttttcattcagtctggccccaagcaggttctttttttcttttctttttcttttttttttttttttttttgagatggagtctcgctctgtcgcccaggctggagtgcagtggcgcgatctcagctcactgcaacctctgcctcccggattcaagcgattctactgcctcagcttcctgagtaactgggattacaggcgtgagccaccgcgcccggctcccgaagccggttttctgttctcttgcagctgggccggggctgagccctcggtgggggcaggggttgcagacctgtggacgcagggcccacgccgcacacacgtggcccccgccaggtgactcacgagccagcgcctgcgcggcggggtggccaccgggtgcaggttcagggccaggggccgggcctcctggggattggcagggcgcccgccgcggtcccatgtgcctggggccggtccccgggcggtggccttcggccctgcgctccggcctggagaagggaggacgccaggggcccgggggagtggaggcggccacgcagcagccccggagcacccgcgcgtccgcaggccgggcccaccgcgctcggcgcccctcgcggccgctttaaggcgccgggcccgcctcaatcgcagggggcgtggcctagcggtcccgcccccggggcgcgcgcgcgcattggctgtgcggggtgcgggcgcgcgggcggcgctttgaaccgggcgcggggcgcggggcgcggggcgctgcggccggtacacgccggggtagggccggggtcgggttgtggtcgggccgggattgggctctcctgggccatggcagccgaggcgcgcgtgtcgcgctggtacttcggggggctggcctcctgcggggccgcctgctgcacgcacccgctggacctgctcaaggtgaggccggggcccgggacgcggggcggatgggaccctggcgccgccgagacgcctgcaaaggcagcagcccggccccacgcacccggggatcgccgcgcccggggctccctcctggagagcgcgaggaggcccccgacgcccggatggccgatcccgggtggccctccagtggtggccgccgagctcgaggcctgcagggcgcagccgcgctccccagcttcccagccggcttcccagttctcggcaggtggcgatccagccccagctctacactttaatacctggtgaccttgggggagtcacttggcctctctgagccacccacccccatacattcaagaacgctccttccgcctagttagaagttgtggggggagttctgtgaggtgcacaggtgttggcatctagagacgtgctggctgtagcatacccagggtgtgggccaagccgccccccacccaggggtgtttagcacaccgccggacgtgtccctgggcaagtggggtgacccgatgccccggctttgggctgcttccttcggagagctgcgtgggcactggaagcgatgttaggaccagcacacccccaggagagatgccaggagaccctgcacgcgtgtggtcctggccctatgaaagcgggcgtttctcagcacgagaagcagccaccgtttttttactttttttttttttttaatgcttatggggcaaaataagacagagctctccttgtttcccagggacagccaaggggcgttgttttctgaccgtgtcttgccacagagaacaaagaagaaagggcctgaggctttgcacagtctgcccagcaggccctgccctgtgaacctggctgtggtcactgggcagccgcctgtctaggggacctttattttagcagcctgtccaggggacttgtattccagcagcctttgaggggactggctttactaatgagcaacaatgctggtcgctgcgtgaaggccaggtgagcagatgtgggcgtcttggggcacctgagacctcactggtcctgggagaggccttcagagctcccaggccacaggcagccacggccagtgagatgcagccacagcgacaggaaggcgctggcatgggcagaagaagcgagcccctccttggcatcgggctcttcctttcctcctgggcgccgcacaggtgcccctcccccagggcctctcccacgttcatctgggtgttgaaggcgggacctgcgtgctgctgtcccttgtccggggtctgagccccactgccccttggccctccccaaccaggcgctctctggctgcagaacaccgcctgggggaggcgggactgccctctggcctgggagggcgggaggagccagctgctggcagcatatggcgctgtggtcagggtgtgctcctgaggactgctcaccaggcctctctgcctggccgtcggaaagatcttttaaagcttcttgagcactttgtcccatgtccctacagtccctaccgtcgcatctggccgggacgggggctgctacctgtgtggcccagtccctctgttctgctgggctcgcacaatgggaggcccctctctgtccccacccatctttgccgacccctgggcgtgcgttacggggccgcgcacgtgcaggtcacactgagcggcggaaggacttctttggggtcagtgctgggggtgggacccaggagctgggatcctgggccaggtgctggccttcctgtctggccctggccaatccccctactgccgggagctctcagctggccaggcgaggaggcagaggtcctgtgagtggtggaggccaacagaatgggaggttgtcgggctgacagcccccgagtgcctgcccacagctcctaggtgctttgcagaggaggccgctatgccctgccgccagccacaccgtccccttgtctgctgctgagctcctgctgcctttcaaggccttctatggctacctcctcagtctcccatggtcctgcaggctccctcgccgtttctgagcggccataaacgtttgtccctcttgagacgtggtgtggtggataaaaagtagggctctggggtctcctcgctgggcccaaatcctgatggcaccagcgggtgcgttacctctccatgcctcagtttcctcatctgcagaaggagaatggcgagcccctgcggccagtgcagccaatactcaggtggtacgcggggcgctcgcggggctcgcggacactctcagctccatgtccactggtgtggttgctgttggaaagcagtggtgtgagctggttccaggcacgggtgtggagtccccgggcagggccgtgggaggccttatcactgcctcctgcctcagtttccccctctctggatgaacctggcaccgatccctcggggtcgctgtggggtctgagagcactcactcccgcaggtgcatctgcagacgcagcaggaggtgaagctgcgcatgacgggcatggcgctgcgggtggtgcgtaccgacggcatcctggcactctacagcggcctgagcgcctcgctgtgcagacaggtgcgtggtgtgtgccagccttgggctcccagactggggctgagtcctgcagtggcatccaagctacttccgtccccttttcaagactttgtgcaaggaaggacccaccaggccgagagctggtgaccccagggtgcgcctcccatgggcacccacccagtttgcagggctgggcctgagaccgccacttactggtggggaagctgaggcccagggagtgagaaagcagggtgcagctctagatttgtgaactggctcagccgcatgctggcacagtggccttgggaaggcccctcagggtccctgtggcccctcgggctgagggggatccctggctgggccgggtggcgaggctgaggggtgtggggcgtgcccgtccctccaagccaggcccttctcccccagatgacctactccctgactcggttcgccatctacgagactgtgcgggaccgtgtggccaagggcagccaggggcctctccccttccacgagaaggtgttgctgggctccgtcagcggtgagctgccgggcgggagggggaggggcgcggggtggtcaggtcggccgaggacgccgtgtgtcagcacggctcatctctggggtttgtgtcaccgcaggtttagctggaggcttcgtggggacgcccgcagacttggtcaacgtcaggttggtgttcccccaccccacctgcaaggccaggggctttcttgtccccagacatgccagggcctgccagggctgcttgcagggtggggtcagcctggaataagccactgagaccctggtgtcctgggcataggagggtgggtgtccctgagccccggcgtgccctgtcctgtgggccccgctgaccagcgtgagctcccctgtgctgccagggctgcccatgcccctcggcccgcccgcccctcccgccacctgcttctgtttcaggatgcagaacgacgtgaagctgccccagggtcagcggcgcaagtgagtcatgggcggccttctcggggtggttgaggtgcaggaggctcgggcgggagcggacccctggctgctctgccgtgacccagctgaggctccagcaggccgaggtgcctgcacggtccatggagggtcctgacggctgttctggactcgggggtgtcactctgcgcccccaggacctttgggttcttcctgtggggagagccttgttggattgggggctgggcctgtttgcaccccagggtggtgagtgcggaggcgaacgccccaggcatggagagagcgcatgcaacagaaacgcccgaaggaggcgctgcctccctgcccagctcagggcagctgtgccctcctgccacggcctggggtctttccagggcccggggtccgctccaactgcagtgtgagccacttcccccgccccttccaaggacccctggggagttctggcttctagctgtgcacacagactgtgttcccccaggaccccgggggctggcgggcaggaggcctgcatgctaggagcggtgcccagccagggactctgttggaaacgatggaacctcctccctgagggccgggcggggcgggcgaggtggctgtgggacgtcaggaccagcttcatgttcccagggagagatcttcaggcccatgaggcctctgcttcctcgagaacccccggcctgcctcggggcctgggaggaccctctgtgggagccggtggtcagggggagtctcatgtggtcattctgtgtccccggcagctacgcccatgcgctggatggcctgtaccgcgtagctcgtgaaggtgaggggcaggtgctgtgcacaggcagggttctggggggcaggcagggtgggcagcgctgtagaagactgggcgctgagggatttgggccaggtgcctggcctcaccccttgcctcaccccttgcctcaccccttccttgtgcagagggtctcaggagactgttctcgggtgcaaccatggcatccagccgaggggccttagtcactgtgggccaggtaggcctcctgcgtggggtgggtgtgggcagtgcctgtgaccactgacctccatcttcagaggggccatagaacaaggcactgggcgccaaaaccctcctggggagccaccagctgtgaccttgtggggcagggtggggggcacgggtgggtcagggctgcagcctgtgaaggacctcgggcaggtgcctcccctgtctgggcctcacggacggacagacggagcaggtgcttggccattgccaggtggtgtcgcctggggccctgtgtgctttccccaagctggggtcccccctacagccctgaccgcccttgtgcccctgcagctgtcctgctacgaccaggccaagcagctggtccttagcaccgggtacctctctgacaacatcttcactcactttgtcgccagctttattgcagtaagtggccggcatggctagggtgggcgtccctgggccggccttgggcgctgagggcacccaggatggggcgagggctgggggaggcgggggccttgggcatctggcagtgccccctggggctcataagtggggtgccagggctttgggagctcatgggtcagcctggtgcccccgccagcatgttcctggcccgccctaggagtcaggtggaggttctggcacgtgggtgggattcggcgatggtgcctggcgtacctgacaggccgctggtgacgagccccctcctcagggtggatgtgccacgttcctgtgccagcccctggatgtgctgaagactcgcctgatgaactccaagggggagtatcaggtgagtggggccctgcctgtgcagttgggctgcacagcccagcgagtcccctcacctctccggggggtggacactcgcactggggacccggggaagggtgtccctcccttctagttgcctgtctctgcacagcacttgccttgggagagggttgtgcctttgaatgcctttgccttgtttttgtttttagagaagacttcttggcccggcgcagtggctcatgcctgtaaccccagcactttgggagcctgaggcaggcagactgcttgagtctaggagttcaagaccagcctgggcaacatactgaaaccctgtctctaccaaaattacaaaaattaggggccaggtgcggtggctcatgcctatcatcccagcactttgggaggtcgaggcaagcagatcacctgaggtcaggagttcaagaccagcctggccaacatggtgaaaccccctctctactaaaaatacaaaaaattggctgggtgtggtggcgtgcgcctgtaatcccagctactcgggaggctgaggcaggagaatcgcttgaacctgggaggcggaggttgcagtgagccgagatcacaccattgcaccccagcctgggccacaagagtgaaactgtctcaaaaaaacaaaacaaaacaaaattggtcaggcttggtggtgcatgcctgtagttccagctacacaggaggctgaggtgggataatcccttgagcccaggatgtccaggccacagtgagccgagattgcaccactgcattccagcctgggtgacagagtgagactgtcttaaaacatttcttttcggccaggcacggtggctcacgcctgtaatcccaacactttgggaggccaaggcgggcagatcacaagtcaggagttggagaccagcctgaccaacatggtgaaaccccgtctctactaaaaatgcaaaaaaattagctgggcctggtggcgcacgcctgtaatcccagctactcaggaggctgaggcaggagaattgcttgaattcaggaggcggaggttgcagtgagccgagattgcaccactgcactccagcctggatgacagagcgagactctgtcttaaaaaaacaaaaaacaaaaaaaaacacatttcttttctttcttttttttttcccctcattgcaacctccacctcctgggatcaagcgattctcctgcctcagcctcccaagtagctgggattacaggcgcccgccaccatgcccggctaatttttcatatttttagtagagacagggtttcaccatgtcggccaggctggtcttgaactcctgacctcaggtgatccgcttgcctcggcctcccaaagtgctgggattacaggcacgtgccaccactcctggctaatttttgtatttttagtagagacaaggtttcgccatgttcgccaggctggtcttgaactcctggcctgaagtgatctgccgcctcagcctcccaaagtgctgggattacaggtgtgagtcactgtgcccggccaaaaacatttctttcacagattaacagaggtggtgccgttcatggcagtctgtgcctcataggtgctctgggtctcctgtcttgggcccccgccaactccatggggcttccacgtttgcagagcccatagctctgtcccttttcttctccctgacgctgccgtgctgcatccctgattctcatggttctgttcacagccccctctgcccactggaccccgggctgcaccctcgggccctggttgtaccgcatgagcaggcagggtggccgttgacctggctggtgcctgcagacctgtggtcacctgttaccagccagcagccgccgctcacacccacacccacacccacaccccacattgagaatgcccaggccaccgtgcctggctggtgcctgggaggggattttcgttgccttttgggtgagaagcagcctttttgattgtttcactgcgttttctgcagggcgttttccactgcgccgtggagacagcgaagctcgggcctctggccttttacaaggtgcagtggtggcggcagtggcggcttgggcaatggggagcgggccccttcgggctctgtgtctctcattttccctgtctccctccagggcctcgtcccagctggcatccgcctcatcccccacaccgtgctcacttttgtgtttctggaacagctacgcaaaaactttggcatcaaagtgccatcctgaccagccgtgggaatggctgggctgccaggccagacacgctaggttcttccaaagagtcccaagcccagcacctgctcctggggccacgacctccctggccgtggccacccgtcctccgcagcaggcccctgctgtccccccacctgctggctgagctcctcctggcctcgtcccctctcagctgtagctgcaccacccccgctctggctaccaggctctcccggctgggcactgcgtggccttgcccctctcccgctggcagctcctcaggggaacaggggctaccagaggctgatttctcccctctcctgggccaggggaggggtattatccctgcctcctgcccccgatgcccaaagcagcatcttccagcactttccatcgaggacttgggtggcagagtgtgggtgcagcctggctgttgctcacccaagtgctagctctgcacttcgtgtctgctgagagcaaccagaccttccatgtcctcgggcagctgcaactccccgcgagaccccgcagctgggtgggatgaacaagcaacgcagaccacaagcgagtgcctgggagggagtggcccagggtggttctggagccattgtgggtgagggtcgagggccaccgaggtcccgcgcaccgctgcctgccctgcagtggctttaacagttagttttgccaaagcctctccactcaccagcaggcggtctctgtcttcagggattgtgcctgcgtccctcgggcacctgggcccccccgcttggctccctgggggaatggcccaggcgggccgcggttcctccttagggccttctccccgacaaggagtccgacggggcggatgctgcatcctctgcctccctggtcgctgggcttcaccccacctgggaagggcagtgtgctctgtgggggctgcaatcaataaatgccgggagctgccacatctgttcctgcctgcgctgcctgcccgctggctgccttgctgtccagaccagcaggaccccctgcaccccctaaggaggaccgggccaaggccttttggggaggagccagggtcctcgctgtgcatttggatgaaggaattggggaagtaggaggaaccaaaaccggtgtggggggaagggaacaagacggtgaggctggggttgagggtctcagacacaggatctggctctgtcattcagactggagtgcagtggcacgatcttggcttactaacctgggcctcctgggctcaaaccagtcttctacctcagccttccaagtagctggtgctatgggcgtgcaccatcatacctggctaatttttgtatgtttttgtagagttggggtctcacaatgttacccaggctggtcccaaacttctgagctcaggggatctgcccattttggcctcccaaagatgcccttttttttttttttaagacagggtcttactgtgtcactcaggctggagtgcagtggcgcaaacagcctgtagtcccagctacttggaaggctgcggtgggatcctttaagcctgcaagttcgaggctgcagggagctatgatcgcaccactgcactccagcctgggtgacagagcgagaccccatttcaaaaaaagaatgtaatggtgggccgggtgtgatctctcatacttgtaatcccagcactgtgggaggctgaggcaagatctcttgagcccaggaattcgagactagcctggacgatatggtgagatctccatctgtacagaaaatttaaaaattacctgagcgtcatggcatgcacctgtagtcccagctacttgggaggctgaggtgggaggatcacttgagcccaggagatttaggccacgatgagccatgattgcgccactgcactccagcctggagaacagagcaagaccctgtctcagaaaaaaaaaaaatctttgatatccttgaatatccattcagtgctcaagtttctctgactgccatgtgcattttgtgaagagctggttttgtttgaactggggaccagtgggagctctgaggtttgtacatggtacccagtgcccaggttggaaattcacacccagggagtggctgggtaggttcagggggaaggctgctgcttcctgagaaaccaggtggttcagaaaggcagctctagccagcaaatcccaaaatctgcagatggagggaccacattctcagagctgctttgatgggagccctggaggaagcggccatcatgacagggcaccggggccaccccagaggctggcatcacccccagcccctccctgcagtcagccccactgggacagtgccagtcaggggatgaaagtgcccagtctggtttggcagggccaggcctggcagtgggccaccacagggcagggtgcagagggtggggtgggagaggaggccagtgggcagggctccttacccaccctccacagaagccacagctccccaggtccagggcacaggcccagggtgggggtaggtcagaggggatgtcagtcctgtggtttcatggcccttaacccacaggccctgcaggccacctggtccgaaggccagaagccagtcagtttcacgcttgggggccagggagagatctggaccctgctgagtcagcatttcagcagtcacctgctgagtcagcagtcatttccgtgcttttttttttttttttttttttctctccttttggatggatttttgctctgtcacccaggctggagtgcagtggtgaggtctcagctcactgcaacctccacctaccaggttcaagcgattttcgtgcctcagcctcatgagtagctgggactacaggtgcacatcaccaagcctggctcctttttgtatttttagtagagacgaggtttcaccatgttggccaggctggtctcaaactcctgacctcaagtgatccacccccttcagcctcccaaaagttctgggattacaggcatgagccgccgcatccagcctccatgcatttttttaagtgacttcatagtttacaaaaagttacacaataatcatttattgtcaagaaatttcaacaaggatgccaagacaattcagtggggaaagaaaagtctattcgcctggcgtgggggctcacacctgtaatcccagcactttgggaggccgaggcgggtggatcatctgaggtcaggccaacatggtgaaaccccatctctgctaaaaataccaaaaaattaccgaggcatggtggagcacaccagtcccagctactcggcaggctgaggcaggagaatcgcttgaacccgggaggcagaggttgcagtgagccaagattgcaccactgcactccagcctaagctagaagagcaaaactgtctcaacaacaacaacaaaaaaacttctgtgctttaaaggacactatcaggaaagcgggagacagcccgcataatgggaggaaatctctgtaaatcgtatcagataagggactacagtctagaacatataagaaaactcttacaagaaagaaagttgttaatggcacaggatgggaaagaaggtatacaaatggccaataaacacaggagacaccactcggcattatcagttgttaaggaaatgcaaatccaaaccaccacagatgcggcagcatccactaggctaaaatcaaaaggacagaaactgagcaagtgttggtgaagctgtggagaaatgagaaccatccagcgctactgggaatggagggtggtgtggccgctgtggaatagagtctggcagttcttcaaagtgttaaacacagttaccatctaacccagtaattccacgcctctgtacgtacccaggaggaaagaaaacatgtatttatagaaacttggacacaaatggagatgggcgtggtggtgcgtgcctgtagtcccagctacccaggagtctaaggtggaaagatcacttgagccccgtagttcaagactagcctgggcaagttagtgaaactccatctctacgaaaatttttaagtattagccaggtgtggtagcgcacgcctgtggtcccagctgttcgggaggctgaggtgggaggatcacttgagcccaggaggtggaggctgcagtgggctgaaattgtaccactgcactccagcctgggcaacagagtgagaccctgtctcaataaacaaagaagcaaaatgaaaatgtagggccgggtgcggcggctcacacctgtaatcccagcattttgggagcctgaagcgggagaatactgaggttagaagttcaagaccagcctgaccaacgtggtgaaaccttgtctctactaaaaatacaaaaaattagccgagtgtggtagtaggcacctgtaaccccagctaaggttgaggcaggagaatcgcttgaacccgggaggtggaggttgcagtgagctgagatcgcatcactgcagtttagcctgggtgacagtgcgagactccgtctccaaaaaaaaaaaaaagaaaagaaatgtagcatttaggagcacatactgaggtggtaaaacaaaaaaggggaaacagtccccataaagtcagaagggtgtgggttgggaaacctgtaactgggaggtggcaccagtggcttctggaagcttctggaacactggttctgctccccactatggcctgagcgtctgccttatcatcaatcacttggctctccatattttctttttttttttttttttttttttttgagacgaagttttgctctttttgcccaggctggagtgcagtggtacgatctccaacctctgcctcccgggaggtatgatcactgcaatctctgcctcccgggttcaagcgattctcttttctcagcctcccaagtagctggcattacaggcatgcgccaccatgcccggctaatttttgtatttttagtagagacagggttttgccatgttggccaggctggtctcgaactcctgacctcaggtgatccacctgccttggcctcccaaagtgctgagattttaggtgtgagccaccacgcccagcctgaagctcatactttaaaaatatttttttgtgtgtggccgagggcagtggctcactcctgtaatcccagcactttgggagactgaggtgggccgatcatctgaggtcagaagttcaagaccagcctcaccaacatggagaaagctcgtctctactaaaaatacaaaattagccgggtgtggcggcccatgcctgtaatcccagctacttgggaggctaaggcaggagaatcacttgaacctgggaggcggaggttgaagtgagccaagattgtgccaccgcactccagcctagggaaccacagcgaaactccatctcaaaaaaaacaaaaaataacaataattattattatttttgagatggggtctcgctttgtcacccaggctggagtgagatggcacaataatagctcactgcagcttgaacttctaggctgaagcgatcctctggccttggcctcccatagccctgggacagcaggcatgagccatggcccagctggttttctgaagttatggagatttttattgcagtctcgtacccgctacacttttgtgaaccgctgcatgcacgtctgaaaagaacacgtgttgtctcttggttacacagcttaatttgggtattcatgactttttgattaggcatgctaattgtaatgtgcaaatcttctttttttttttttttttttttttttgaggcaaggtttcgctcttattgcccaggctggggttcaatggctcggtctaggctcactgcaacctccgcctcctgggttcaagcaattctcctgcctcagcgtcccgagtagctgggactacaggcacctgccaccacgcctggctaacttttgtatttttagtagagacggggtttcaccatgttggccaggctggtctcgaactcctgacctcaagtgatccgcctgccttggcctcccagactgctgggatgacaggtgtgagctgccatgcccagccgtaatgtttaaatcttctatgtccttgcttggttatgttgagccaaccttgtaaattctgagattgcgtgtgaaaggttctccctgtggttctggatctgtccaatcctctgtgcacctcacagtccttcctgacgtgatccagctccgtgtctgcgcttgccgctttagtctcaggtaaacatcttagtggcacagagcccaccagtctgcccagacaggggagaggcgggtgagtggtggcaaaccatgtgacccagttcttttttttttttgagatggagtttcgctcttgtcgcccaggctggagtgcagtggcatcatcttggctcactgtaacctccacctcctggttcaagtgattctcccgcctcagcctcccaagtagctggcattataggcatgcgccgccatgcccagctaattttatatttttagtagagatggcatttcaccaggttggccaggctggtcttgaactcctggcctcaaatgatctacccacctccacctcccaaagtgctgggattacaggcatgagccactgtgcccggcctccatgtgacccagttctgatggcaagacgtgaggagagatgccctgggagccctgatgcagtccagcctctgtggacacacttctgatggtcacacagttacgtttggcagaccattctttttttcagtgatggaatattcttctaggtcctatgtaatcattgttgttttcacttctattttgtctgatgttaatatcaccgtacctgccttatgttctacctttccgggtcattttgttttgggtgtgcataaatactcatgtggcaattcaggccggacgcagtggctcgcgcctgtaatcccagcactttgggaggccgaagcaggtggatcacttgaggtcaggagttcaagaccagcctggccaacatggtgaaaccccgtttctactaaaaatcaaaaattagctgggcatggtggcgcgcacctgtagtcccagctactcgggaggctgagacaggagaatcacttgaacccaggaggcagagattgcagtgagccaagattgcaccactgcactccagcctgggctacagagctaaactgtctcaaaaataaataaagtaataaaataataaaataaatagtcacgtgatgcttcaggtcatctgacatcctgccccccaccccttagtaaaatgcctgctgttttattcaagcagctaccaccccaccccagtccttgggcctcaagggcaccagggcctgaccccagctcccagcatgaatagggttggtttaaaccagtcggcatggcccacagtgactggtttaggcatgggcctgtcacccacactgggccaatgatatgtaagatgtttattgtagcttccgggatggaaacttctctgccagcttgtgggttgggcaaggacgacactccgggccctaccggcggaagctctgctcctgtcgtgcgtggaccacgcagcaaatggccttggaggctgctggcagccatcttgtgaccatgaggcaagtcagcgcaggccgaagctgacgacgcgaagacaatgaggagagggagaaagagccgatctttggtgtgtattggctgtgacgtgctgccgcctctctggagaccgggttcattatacttttcctggtatcttctcatgtttgctctgctggctttgggcccgagttttacctcctgggtgtattgtgtgtgcctgttttgtggtgttggttttgctcctgggtttgttgacccttgggtgtctgctcttttttttttttttttttttttttgggacagagtctcacgctgtcacccaggctggagtgcagtgacctgatcttggctcactgcagcctctacctcctgggtacaagcgattcttctgcctcggcctcctgaatagctgggattacaggtgcctgccacggctaatttttttacttttagtagagatggggttttgccatgttggctaggctggtcttgaactcttaacctcaggtgatctgcccacctccgcctcccaaagtgctaggatttataggcatgagtcaccgtatccagcattttttgcttgtttgtttgttttgagacggagtctcgctgtgtcacccaggctggagtgcagcggtgtgatctcggctcactgcaagctccgcctcccaggttcacaccatcctcctgcctcagcctcctgagttgagtatctgggactgcaggcgcccgccaccacgcccggctaatttttttgtattttttagtagagacggggtttcaccgtgttagccaggatggtctccgatctcctgacccggtgatccacctgcctcggcctcccgaagtgctgggattacaggcgtgagccaccgcacctggccagctctagctggttttacgggtgaatttttaccaaacattcatggaacagaaaaatccgtgtcttgaaattttcacagaaggctagcatgatctcaactccaaaatgaaaattaagacacatctgtttcatgactgtagatgtagaaagcctagataaactattaataaattgaagtcagctgcatataagaaatgtcagacctcatgatcacgtaggggttatatcagaatttcaatgtcaggaaactaactaatgttatctgcatgttacattaagagtaaaggaggctgggcgtggtggctcacgcctgtaatcccagcactttgggaggccgaggcaggcggatcacctgagctcaggagttcaagaccagcctggccaacatggtgaaaccccgtctctagtaaaaatacaaaaattagcccggcatcatggagtgtgcctgtagtcccagctactcaggaggctgacgcgggaccctcgcctgaacctgggaggtagaggttgcggtgagccaagatcgcaccattgcattccagcctgggcacgaagcgagactccgtcaaaaaaaaaaaaaaaaattaaagaataaaatttctgcaggcatctcaacagctacagaaacagcattttgtgcaattcaatactgatttgcaggggccaggggtcatggctcatgcctgcaatcccagcactttgggagaccaaggcaggtggatcccttgggctcaagagttcaagatcagcctgggcaatgtagcaaaaccccatctaaaaaaataagaaaatattaggcaagcatggtgcatatgtgcacagggcgcacacctgtggtcccagctactgggggtctgaggtgggaggattgcttgagcccaggaggttgaggctacagtgagccgtgatggtggccctggactccagcctgggcaacagagtgcaaccccgtctcaaaaaagaaaaatactcatttgcaacttttatttttttaattaaaaaaaaatttaatttatttatatttttggggacagagtctcgctatgtcacccaggctgcagtgcgatggcatgatctcagctcactgcaacctccaccttctgagttcaagtgattctcctgcctcagcctcctgaatagctggaattacaggtgaccgccaccatgcctggctaatttttgtatttttagtagagacggggattcaccatgttggccaggctggtctcgaactcctgacctcgtgatccacccatctcaacctcccaaagtgctggggttacaggagtgagccaccgtgcctggcctcatttgcaatttttaaaaattgctttgcaatgccgggcgcggtggcttacgcctgtaatctcagcactttgggaggccgaggtgggcacatcatgaggtcagatcgagacgatcccggctaacacggtgaaaccccatctctactaaaaatacaaaaaaaaaaatagctgggcatggcggcgtgtgcctattatcccagctgctggggaggctgaagcaggagaatggcgtgaacccgggaggcggagcttgcagtaagctgagatcgcgccaccgcaccccagcctgggtgacagagcaagactccatctcaaaaaaaaaaaaaattgctttgcaacctagtagtagaagaacaattccttgatctgataaagagcattcccttaacaagatatagcaaaatttaaaacccgtgaattatagaaaagatacacatttgattatataatatttttaaaaatatgcatggcacaagactctataaacaaatatacacaatggaagccatggtgggaggtatcggccagggccacgtctgagtccttggcagagctgggtcacgcagtgaagagctgggaggggcctggacagggcagcagtgggtcaggtttgggcttaaagaagacgtcccagctggtggttcttcaaacaattaaacatacagtggccgtgcaacccagcaatgccactcctaggtgaggacccaagataaatgaagacgtccggccaggcgcattggctcacacctgtaatcccagcactttgggagccttagacagatggatcactttcagctcaggaattaaagaccagcctgggcaacacagggagaccctgtctcgttaaaaaatacaaaaattgccaggcgtggtggctcatgcctgtaatcccagcactttgggaggccgaggcaggcggatcacctgaggtcagtagtttgagaccagcctgatgaacatggtgaaaccccgtctctactagaaatagaaaaattagctggacgtggtgactaacacctgtaatcccagctactcaggaggctgaggcagaagcgcttgaacctgggaagcggaggttgcagtgagccgagatcacgccattgcactccagcctgggcaacaagatgaaactccatctcaaaaaaaaaaaaaaaaattagctgggcatcgttgtcttgtgcctgcggtgccagctattctggaggctgagattggagaatcatttgtgcccagtgaagcagaggtggcagtgagccaagatcatgccactgcgctccagcttgggtgacagagtgagactctgtctcaaaaaaaaaaagagtctacataaaacattgtgcgcgcctgtgcatagcagcacatccataatcacagagaggcggaaacagctgtgtccatcaacagaggttggtcacacagggggtcctgtgcccaatgcagtggactcttgggccttagaatgaagttctgatccacacggcagcaccgacggaccttgggcactgtgctgtgtgaaataagcagacagatgctgtgtggcagcacttacaggggcatcctgagcgactttgtggagacagctcttagggctggggagggagggatgcgggaagggggcgggagctggagggtggagggctctttctgagatgaggaaatgatctaaaactgcctgcggtgacggctgcacagctctgaagatgcagaaactcgctgagctggacgcattctgaattgtgtggtatgtgaattatgtctcagtaaagccattaaaaaaaaacacccaggagccaggcgcagtggctcatgcctataatcccagcactttgggaggcggaggcaggcggatcatctgaggtcaggagttggagaccagcctgaccaacatggtgtaacctcgtctctgctaaaatacaaaaattagctgggtgttgtggcgggcacctttaatcctggctacttgggaggctgaggcaggagaattgcttgaacctgggaacgggaggttgcagtgagccaagatcgcgccattgcactccagcctgggcgacagagcgagactccgtctcaaaaaaacaaaacaaaacaaaacagccaggcaaccaagtagacaatggagggagggggtgacagctgaggacgcccattgtctgctggtgctccaggcggtgctccccactcccagcccagtcgccccctgctcctggcctggatttgaggcctagagagacacctgccctcccccggatccgtgccccgcagaagtgcagtcttggtgcccaaatgtgcgcccgctggggcagaggagaatccgcggggcctgaagcagaatcgcgccctccccccaacctgccggctgcccgggcgctccccatgggcccagacgcaggagacaaaggagaacatgggggttcaggtatgcactggggcgcagacagggccaggcaagacaagagggcagggctgccgggaaggacgagtgcctcgggagcctctctgcaggtgagacacaggttgaagcattgactgatttgttctctcgcagtgaggcaggagaggagggaataattggggtgacccagggttgaggcgtgagcaagagaacagcaaaggcagctggttctgggtaacactgggcctcactcctatggtaacaagacagtttccacttcagcctctgattggctgtgagccagtccttcataaggagtcaccagttggaggcctctaaagggcacctggggtgttaccaaattctcctggcttcctaaaaaccctggggagcactgccatagaggctctggggccgcctgctccgcccgctgcctctctgtgaattgcaccttgtggtcttcaatgaatctgtgctttcgtcactccgttttttgcttgtcttgtctttcgttacttcattcttttgttgctttctttgtgcgtgttcaattctttgttctgcacacaagaacctaaacaactcacagtcgagaccttccaaccagtaacaccagcggcccctcccctgggaagcctccagaggacgggaggctgcctgtaaaagctgaagagtcctgagtcttctgcgtgattccagagactcctgggatgccctggggtggggggcaggggaacgctggggcacgggtggacccaggaaagagacgtgtagagcgccttgccccaccaccctcctcccaggccatgtcatctgccacccaggccagggctacacctcacctgccactcaggccataccataccctcacctgttgcccaggccacacccacatcctcacctgttgcccctcctccttgcggcccaggaggtctctgaagatgcaggctctaccttctgcccggcccccagccctccacccgagaagtggatgtgaagtcactctgtgcatctccgcccctttcccacccattggcccttgccctgctcagggtcccacgctcttccctcctcctgcccctcgtggcccctcctgtctgccctggcccccccacacatccagggggcagtttgcttcctccactgacctcccctctctgtgacattatctgtttttacaaacttcaggcatctaagccgggcacattggcccaagcctgtaatcccagcactttgggaggccgaggcaggcggatcacttaagctcaggagttcgaaaccagcctggccaagatggtgaaaccccatctctactaaaaatacaaaagattagccggctgtgatgacgcgcacctgtaatctcagctactcgggaggctgaggcacgagaatcgcttgcacccaggaggtggaggctgcagtgagccgagatcacgccagggcactccggcctgggcgacagagtgagacttcgtctcaagaaaaaccaaaaatccaaaagaactacaggcatcggctgtgtccccactaggaagccggaggggagcagggctgggtgtgtcttctctggctgcgtccctgcggccacaaggcctgttcttcctctgtgccccgcctgccaaggacccagccttgtgaaggatggatgaatgaatcattgagcaaatgaatgagtgtgtgaacaggtgagtgaggagaagccggcagaggcggtggggtggatggtccacccggctggccagcggcctgtcactccctgagtggcctctgggtggcagccatgtggcgctgtcggctcaggaaggcttggtgctggaatggggctgggacatggccagccaggcagggtgaggagggtggcagcgcccagtgcagcctggacagatggggttctgcccggcagggctggcatgggggcttctttatgccaagccagccctgggggaggcctcggctgtccagggtgaaacagggtcagggtgatcaggctcggtttgtgggggcggcctgtcctgctggagggtcctcctcacccaaccccagcctgctgcaggctgtctgcaggggagatggcaaagacggtgttgtccagtttgcttgggacatgaatggtctggcaaatacgcaatgacacagctctggggtccagatccggcccaggcggccgcctgacagaggaggtgcccacagagcttccgtgagagggcagcccaggcccaagcagcactagaaccccggctttgggcttttggggacttagccggccccggggccaggggtaggatcaggtttccacaggccagacggccccgcacagtcaccaccgtcaccgtcaccatcacccggtgctgggcgggcaccatgtggactccacttggcactgggccgatgggcggatgccagagccagagcaaaggcctcgttagcccctcggggagggcacggcagggccgggcgactcaggagggctgcggggtgacgtctgattgagcctggaaggacaggccgaccacaggatggaggccacagcatccttcccggagtctgaccccacgctggagacagaggggctgggctgggctgggcaacctagacccgggagcccatctgtccagccaccagcgtccgtctgtctgggtccctgctagggagagtctgcagcagggagaccccggcagcttcgagtatggaggggagactctggccgcctgaggtgagtaacgttgggggatgattgtggggctccattgggacttggcagggctctgggggtgggcactgcaggggaagcagctgcaggcagggtgcagaggaggctcagctgagtctcccgcgtgggacttccaacccctccagggtctctccaacccacttcagcttgcaatccaccctcctgccctgtgaccatgtgtggtcacccgccctcagggcacaaaaggggtccagctctattttccagggacaactccagacccatgatcccagaagcttggggcctgcctttatcccagcacccaaccccgagagcccccagtgatggaactggtgcagcggccaccactgcccggacccgggagcaacaccgatgccacacctggcggcaggaacagggcagtgatgggctgtctgcaaggggtccccccttccgcagcaggtctcttggctgcagctcagccccagcccctgcggtccccagagtcccggtcactgggggctctgcaggccacccttccaggggcatccacccacccccgagtccgggtcaggcagaacccagggcccgccgtcccctcctgcaggctcaggacctcctggggggagttccctgtgtgatgcagagggcacgctcaccctgctgggaaggctcactgcttcccaaggggtctgagctttactggcacctcactgcagtcccttccccggggagactctggggcttcccctgtgggaccaggcacccggaaaggcagctctgtccctgctgagtcacgcgcaccatcctgcagacgggagggcatcttcctaggctttcctccagccaagagtggagctgggacctgggaacctccctggaaccacccctgctctccggcaaggcgttccaccagcctgtgtctacacacgtagccccgcagagcaggcttcgtgatgcctggagacacccacttccccttccttctcctgggacttctcagtcacacgggctgagctgcagagggtgcgtgacctgggctgagctggtctttggcaactggggactttggtttgacggttggtggaggggagactctcctaacttccaggggtgtgagtcgcaggcggtgcagatgataggacagtggccgttgcctagggctgaaaccaacacagcggtgggcggagcacagggaacttcggagagggagcccggcccccgagtcagctgctcctgcgggtgctccccaaatcatctagtgatgtgatccatttgtctttccagcccatttcagttgagtttccaatgacttacaaccaataatatctcaactgatacttgggctcttcaagcactagaattgtggtgacggcaggagcgttaacacactctggggcggggcagggactgcagactgagcgggctccaggtgaatgccagcttccagccctgctgagccaggctgggacgaacatgctcactaggtccgtctccacctactgtgggccagcgctgcgtggctcactccagggaagacagcaagttggctcagccgctgctgtgtggctgctgctcccctgagtttatggctgtccatggcatctgccagggtccatctggttttttgtgggaattgtgcccgtgaatttaacaaggattgatgggcattgccatcttgtctttttttttttttttagacagagtctcactctgtcgccgaggctggagtgcagtggcacgatctcggctcactgcaacctctgtctcctgggttcacacgattctcctgcctcagcctcccgagtagctggtattataggcgcccaccaccacacccggctaatttgtgtctttttagtagagacggggtttcaccatgttggccaggctggtctcgaactcctgacctcaggtgatccgcccgccttggcttcccaaagtgctgggattacaggtgtgagccactgcacctggcctatgtttaatacttttttagagatggagtctcgctctctgttgcccaggctaaagtgcagtggcacgatcacggtttactgcagccttgacctcccaggctcaggcgatcatcccacctcagcctcccaattagctgggaccacaagcacataccactgcacctggctaattttttattttttatttttttgagacagagtctcgctctgtcgtccaggctggagtgcaatggctcaatctcagctcattgcaagctccgcctcccaggttcttgccattctcctgcctcagcctcccgggtagctgggactacaggcgtccaccaccacgcccagctaattttttgtatttttagtagagatggggtttcactgtgttagccaggatggtctccatctcctgacctcatgatccgcctgccttggcctcccaaaatgctgggattacaggtgtgagccaccacacctggcctaattttaaaattttgtagtagagacagagtctcactatgttgtccaggctggtctcaaacccctggtctcaagtaatcctcctgttttggcttcccaaagtgctgggataacaggtgtgagccgctgtgcctggcccatactcacagctcacaagtgacctgtgtggtttcctctctccttgtgtggctgcctgagaccaggctcaggtctggaatgtcggcaaggagtcacccactcttcttcttctttttttatttatttattttttgagacggagttttgctcttgttgcccaggctggagtgcaatggcgcaatcttggctcactgcaacctctgcctcccgagttcaagtgattctcctgcctcagcctcccgagtagctgggattacaggcatgcaccaccacacctggctaattttgtattttagtagagacagggttctccatgttggtcaggctggtctcgaactctcaacctcggatgatccacccaccttggcctcccagagtcctgggattacaggcatgagccactgtgcccagcaggtcacccactcttgtctcttttgtggcactcctgtgtgcccatccattgctccctctatccatcatagcctctagggtggccccacgagcccacttgtgttggtgccccagtgagttacccccacctggagtgtgggtgggagcgggctcccttctatgaataggttgtagccaaagtgacgggctgtccttccaaggggaggtcacgccaacactgggcttctgttttcctctctctctcttacacattctgagcagagctggctgccaggtgctgagccgccccaagaaaaagccctcgtggcaagaaactgaggcctccagccagcagtcagggacccgaggcctgagacggtggagggtgagcttgcaaagggaccccacagtcgggccttgagaggcccacgggcctggcccacacctcggctgcagccttgtgaaggtccctgagcaggggacccagacttctgtcctacagaaacttggagataataaatgcctgctcttctacggcactgagtgtcgggtgatttgttacgggcagtagacagctaatacctgccccttaggacaccaagtcctcgcctcctggaggcccaagccccagggagccatgcctgacttgccgcctgtcgatgggccacgcgttccttgttgatgccattctggggtcccctcaccctgacatactaggagccagttccgagggaggctcttctgccaccaaccctggcccagggggacactgagctccttgatgctgagggccggtggttccttatcgcctggcgaccagcgtgtcctccgggtccttttccaataccagcacctcccagctcaaaaacacaacccagcactcctgttcctccgtctcccggccctccctcgacactgggccgaggcagcctgtgcacctgccccaagctcccaggagctgacccagcagcggattcggcctggttcccggcatccttaccgggatttggaaaatgctcctttcaatcaataaaggccccacgcgggccttcttccgccctcccctccagcatcctccatctccatttccacccgtcctccccgtcctgccaggccgcagctccttgcagaataacccacaccctccagtcgcagggacagaacaccctagttactggcctagaattttgcgggggacgaggacaggcagaccctaaggaggacactcgcctcaggtgagacctttgcaaggtcccggcagtgggagccactcccgccactgcggagggaacagagggcagggatctaagaggcttctacccaaataccgcatccaggtcatagcgtcccaccccccgctgccaccggggccctgacttcaacacgggaggcagaccagacgccaccgccctgggatcagagcttgggcccgagggttggccccgtctgcactctggctttcggaatgaggctcgctgtcaatgctgtggtggagctgcattcgtttccggggcttctataacaaggtgccatagaacagggctccaacagcagcccattctcccactgtcctggaggctggaagttcgagaccaaggtgcctgcagagttggttcctcctgaggcctttctccctggcttgtagatggccctcttctcctgactcctcacacagagtcatccctctgtgtgtatctgtgtcctagtctctcttctttttcttttcgcttcttctttttttttttttgaagacagggtctctctctctctgtcacccaggctggagtgcagtggtgttatcatagctcactgcagcctagacctcccaggctcaggtgatgctcctacctcagcctcccaagtagctgggaccacagacatgtgtcaccacacccgactaattttttatattttgttgtagagatggggtctcactatgttgcccaggctcaactggctttaagccatcctcccacctcgaccttccaaagtgttgggattacaggtgtgagccactgagcctggcccttatctctttttctcaggacacgactcaggccgggcgtggtggctcatgcctataatcccagcacattgggaggccaagacgggcggatcacctgaggtcaggagttccagaccagcctggtcagcatggtgaaaccccgtctctactaaaaatataaaaattagccaggtgtggtggccagcgcctgtaatcccagctactcgggaggctgaggcaggagaatcgcttgaacccaggaggcggaggttgcagtgagccaagatcgcaccattgcactctagcctgggtgacagagtgggactccgtctcaaaaaataaaaaaagtgggggatgggggtgggggtgggggtgggccaggcgcggtggctcacgcctgtaatcccatcactttgggaggccgagacgggtggatcacctgaggtcagaagttcgagaccagcctgaccaacatggggaaacttcatctctactaaaaaatacaaaaattagccgggtgtggtggtgggtgcctgtaatcccaggtgctcaggaggcgaagcagaagaatcacttgaacccaagaggtggaggttgcagtgagccaagctcgtgacactgcactccagactgggtgacagagcaagacttcatttcaaaggaaaaaaaaaacaaggccagcggtcatgtgggaacaggactcgctgtaatcccctctttaaaggccatatctgtaaatacagccccgttctcaggaaatgagggtcaggacctcaataaacacattctgaggagagaacaccgccgcgattgggtcttctggatctcaccggaggccctgaactgctgccggctgccctgagcttttttctcgccttcagtctcggtgacacccctgcacctctcaaacgcgggagaccaggcttggtggtgagtcccgtccacttgggtccaggccaggccatcccgggtgagccctacagccgtgcgccgccaccaccccatgcccagcagggaagttggtggagaaacacccgccgcgctggcggggggagcactgaggccgtgagcggcacgcagggcgggaggcgcggggcaggaagcccagtggtgctcctggccctggacagtctggaggtcccaggggccaccgcacagtgcaggcttggcctcttccgggcttcctgcgggaccccctccagccctcccagcccctccctcccccagcctccctccccagcccctccttgaagccacagggaacccaagacacatcttggtcctcaccccgcaccaggggctttgagaccacccctcagcacccacgcctgccccctctgggcaccccccccaacccaggctcccctcacagccccgggcctgaggcttgtctgtccccatcagaccttgctgcccccgcaccctgtggggaatccagggatcgcgctgctcctccctgccctgtgcccctgcctccccgccggcgctgcccaggacccgcagctcccgcacctgttgctgatcggagcctggccccgtccacctccaccatcccgccaactggcctgatttgatcgagcctcgccagatgcagcctaatgtgacttcgcagagcctgatgaccttgatggtagctcagggcgagagtgtctggcgaggcagatgccgggacacaggtgccctcattacaacctccccttttgcaggaggatggggggctcactcagggagaggaggggcggccatgggaggacgactttgagtccctcagtccagcctgcttcccacaagccagggccaggctgggcagcgcccaccaaactttccctaggacccggctccagggggtctgagggtttccctggcaagccacctccagagccctgggcgccccatctgtgaaacggggaggagagcccagccttccacagagatggacctccaggcgcggccacacccgggtcacacacacacacactctggtctctgaccagccccatctcggccgagggtccatcctggtgccctgattggggaacacctgctgcgtgcagggttgaggtggccggagaggctggagcgagagtcctggtcaccaggggcctccgaggctgcctaccccagtgcctgcacccggcaccgtcgctgggggcccatgatcagatttgcagccgggccagagggacacacccttcccccacctcgctgcactgggtcttgggtgtgcctggacgggagcccctcgcacctcagccctggaggctcgccctggccaggccttctgggggagaggcagcccctccagagccctggcatccttgctgctccgaagaggccctgaaggagtgagcgacacgcgggggcctcacacacacacacacccgcaaacacatcccccctctacaaacacccccccacatacacaccacaaacactccacaaacacacacatcacacacaccacacacagaaaatacacaatacacaccacacacacacctcacacacacctcacacacccccacacacacaccccccacaaacacaccacacacacacaccacacacactccacaaacacaccacacacaccacacacagaaaacacacaatacataacacaccacacacacaccacacacaccacacacaccccacaaatacacacaccacacaccccaaacacacagcacacacaccacacacacatcacacacagaaaacacaatannnnnnnnnnnnnnnnnnnnnnnnnnnnnnnnnnnnnnnnnnnnnnnnnnnnnnnnnnnnnnnnnnnnnnnnnnnnnnnnnnnnnnnnnnnnnnnnnnnnnnnnnnnnnnnnnnnnnnnnnnnnnnnnnnnnnnnnnnnnnnnnnnnnnnnnnnnnnnnnnnnnnnnnnnnnnnnnnnnnnnnnnnnnnnnnnnnnnnnnnnnnnnnnnnnnnnnnnnnnnnnnnnnnnnnnnnnnnnnnnnnnnnnnnnnnnnnnnnnnnnnnnnnnnnnnnnnnnnnnnnnnnnnnnnnnnnnnnnnnnnnnnnnnnnnnnnnnnnnnnnnnnnnnnnnnnnnnnnnnnnnnnnnnnnnnnnnnnnnnnnnnnnnnnnnnnnnnnnnnnnnnnnnnnnnnnnnnnnnnnnnnnnnnnnnnnnnnnnnnnnnnnnnnnnnnnnnnnnnnnnnnnnnnnnnnnnnnnnnnnnnnnnnnnnnnnnnnnnnnnnnnnnnnnnnnnnnnnnnnnnnnnnnnnnnnnnnnnnnnnnnnnnnnnnnnnnnnnnnnnnnnnnnnnnnnnnnnnnnnnnnnnnnnnnnnnnnnnnnnnnnnnnnnnnnnnnnnnnnnnnnnnnnnnnnnnnnnnnnnnnnnnnnnnnnnnnnnnnnnnnnnnnnnnnnnnnnnnnnnnnnnnnnnnnnnnnnnnnnnnnnnnnnnnnnnnnnnnnnnnnnnnnnnnnnnnnnnnnnnnnnnnnnnnnnnnnnnnnnnnnnnnnnnnnnnnnnnnnnnnnnnnnnnnnnnnnnnnnnnnnnnnnnnnnnnnnnnnnnnnnnnnnnnnnnnnnnnnnnnnnnnnnnnnnnnnnnnnnnnnnnnnnnnnnnnnnnnnnnnnnnnnnnnnnnnnnnnnnnnnnnnnnnnnnnnnnnnnnnnnnnnnnnnnnnnnnnnnnnnnnnnnnnnnnnnnnnnnnnnnnnnnnnnnnnnnnnnnnnnnnnnnnnnnnnnnnnnnnnnnnnnnnnnnnnnnnnnnnnnnnnnnnnnnnnnnnnnnnnnnnnnnnnnnnnnnnnnnnnnnnnnnnnnnnnnnnnnnnnnnnnnnnnnnnnnnnnnnnnnnnnnnnnnnnnnnnnnnnnnnnnnnnnnnnnnnnnnnnnnnnnnnnnnnnnnnnnnnnnnnnnnnnnnnnnnnnnnnnnnnnnnnnnnnnnnnnnnnnnnnnnnnnnnnnnnnnnnnnnnnnnnnnnnnnnnnnnnnnnnnnnnnnnnnnnnnnnnnnnnnnnnnnnnnnnnnnnnnnnnnnnnnnnnnnnnnnnnnnnnnnnnnnnnnnnnnnnnnnnnnnnnnnnnnnnnnnnnnnnnnnnnnnnnnnnnnnnnnnnnnnnnnnnnnnnnnnnnnnnnnnnnnnnnnnnnnnnnnnnnnnnnnnnnnnnnnnnnnnnnnnnnnnnnnnnnnnnnnnnnnnnnnnnnnnnnnnnnnnnnnnnnnnnnnnnnnnnnnnnnnnnnnnnnnnnnnnnnnnnnnnnnnnnnnnnnnnnnnnnnnnnnnnnnnnnnnnnnnnnnnnnnnnnnnnnnnnnnnnnnnnnnnnnnnnnnnnnnnnnnnnnnnnnnnnnnnnnnnnnnnnnnnnnnnnnnnnnnnnnnnnnnnnnnnnnnnnnnnnnnnnnnnnnnnnnnnnnnnnnnnnnnnnnnnnnnnnnnnnnnnnnnnnnnnnnnnnnnnnnnnnnnnnnnnnnnnnnnnnnnnnnnnnnnnnnnnnnnnnnnnnnnnnnnnnnnnnnnnnnnnnnnnnnnnnnnnnnnnnnnnnnnnnnnnnnnnnnnnnnnnnnnnnnnnnnnnnnnnnnnnnnnnnnnnnnnnnnnnnnnnnnnnnnnnnnnnnnnnnnnnnnnnnnnnnnnnnnnnnnnnnnnnnnnnnnnnnnnnnnnnnnnnnnnnnnnnnnnnnnnnnnnnnnnnnnnnnnnnnnnnnnnnnnnnnnnnnnnnnnnnnnnnnnnnnnnnnnnnnnnnnnnnnnnnnnnnnnnnnnnnnnnnnnnnnnnnnnnnnnnnnnnnnnnnnnnnnnnnnnnnnnnnnnnnnnnnnnnnnnnnnnnnnnnnnnnnnnnnnnnnnnnnnnnnnnnnnnnnnnnnnnnnnnnnnnnnnnnnnnnnnnnnnnnnnnnnnnnnnnnnnnnnnnnnnnnnnnnnnnnnnnnnnnnnnnnnnnnnnnnnnnnnnnnnnnnnnnnnnnnnnnnnnnnnnnnnnnnnnnnnnnnnnnnnnnnnnnnnnnnnnnnnnnnnnnnnnnnnnnnnnnnnnnnnnnnnnnnnnnnnnnnnnnnnnnnnnnnnnnnnnnnnnnnnnnnnnnnnnnnnnnnnnnnnnnnnnnnnnnnnnnnnnnnnnnnnnnnnnnnnnnnnnnnnnnnnnnnnnnnnnnnnnnnnnnnnnnnnnnnnnnnnnnnnnnnnnnnnnnnnnnnnnnnnnnnnnnnnnnnnnnnnnnnnnnnnnnnnnnnnnnnnnnnnnnnnnnnnnnnnnnnnnnnnnnnnnnnnnnnnnnnnnnnnnnnnnnnnnnnnnnnnnnnnnnnnnnnnnnnnnnnnnnnnnnnnnnnnnnnnnnnnnnnnnnnnnnnnnnnnnnnnnnnnnnnnnnnnnnnnnnnnnnnnnnnnnnnnnnnnnnnnnnnnnnnnnnnnnnnnnnnnnnnnnnnnnnnnnnnnnnnnnnnnnnnnnnnnnnnnnnnnnnnnnnnnnnnnnnnnnnnnnnnnnnnnnnnnnnnnnnnnnnnnnnnnnnnnnnnnnnnnnnnnnnnnnnnnnnnnnnnnnnnnnnnnnnnnnnnnnnnnnnnnnnnnnnnnnnnnnnnnnnnnnnnnnnnnnnnnnnnnnnnnnnnnnnnnnnnnnnnnnnnnnnnnnnnnnnnnnnnnnnnnnnnnnnnnnnnnnnnnnnnnnnnnnnnnnnnnnnnnnnnnnnnnnnnnnnnnnnnnnnnnnnnnnnnnnnnnnnnnnnnnnnnnnnnnnnnnnnnnnnnnnnnnnnnnnnnnnnnnnnnnnnnnnnnnnnnnnnnnnnnnnnnnnnnnnnnnnnnnnnnnnnnnnnnnnnnnnnnnnnnnnnnnnnnnnnnnnnnnnnnnnnnnnnnnnnnnnnnnnnnnnnnnnnnnnnnnnnnnnnnnnnnnnnnnnnnnnnnnnnnnnnnnnnnnnnnnnnnnnnnnnnnnnnnnnnnnnnnnnnnnnnnnnnnnnnnnnnnnnnnnnnnnnnnnnnnnnnnnnnnnnnnnnnnnnnnnnnnnnnnnnnnnnnnnnnnnnnnnnnnnnnnnnnnnnnnnnnnnnnnnnnnnnnnnnnnnnnnnnnnnnnnnnnnnnnnnnnnnnnnnnnnnnnnnnnnnnnnnnnnnnnnnnnnnnnnnnnnnnnnnnnnnnnnnnnnnnnnnnnnnnnnnnnnnnnnnnnnnnnnnnnnnnnnnnnnnnnnnnnnnnnnnnnnnnnnnnnnnnnnnnnnnnnnnnnnnnnnnnnnnnnnnnnnnnnnnnnnnnnnnnnnnnnnnnnnnnnnnnnnnnnnnnnnnnnnnnnnnnnnnnnnnnnnnnnnnnnnnnnnnnnnnnnnnnnnnnnnnnnnnnnnnnnnnnnnnnnnnnnnnnnnnnnnnnnnnnnnnnnnnnnnnnnnnnnnnnnnnnnnnnnnnnnnnnnnnnnnnnnnnnnnnnnnnnnnnnnnnnnnnnnnnnnnnnnnnnnnnnnnnnnnnnnnnnnnnnnnnnnnnnnnnnnnnnnnnnnnnnnnnnnnnnnnnnnnnnnnnnnnnnnnnnnnnnnnnnnnnnnnnnnnnnnnnnnnnnnnnnnnnnnnnnnnnnnnnnnnnnnnnnnnnnnnnnnnnnnnnnnnnnnnnnnnnnnnnnnnnnnnnnnnnnnnnnnnnnnnnnnnnnnnnnnnnnnnnnnnnnnnnnnnnnnnnnnnnnnnnnnnnnnnnnnnnnnnnnnnnnnnnnnnnnnnnnnnnnnnnnnnnnnnnnnnnnnnnnnnnnnnnnnnnnnnnnnnnnnnnnnnnnnnnnnnnnnnnnnnnnnnnnnnnnnnnnnnnnnnnnnnnnnnnnnnnnnnnnnnnnnnnnnnnnnnnnnnnnnnnnnnnnnnnnnnnnnnnnnnnnnnnnnnnnnnnnnnnnnnnnnnnnnnnnnnnnnnnnnnnnnnnnnnnnnnnnnnnnnnnnnnnnnnnnnnnnnnnnnnnnnnnnnnnnnnnnnnnnnnnnnnnnnnnnnnnnnnnnnnnnnnnnnnnnnnnnnnnnnnnnnnnnnnnnnnnnnnnnnnnnnnnnnnnnnnnnnnnnnnnnnnnnnnnnnnnnnnnnnnnnnnnnnnnnnnnnnnnnnnnnnnnnnnnnnnnnnnnnnnnnnnnnnnnnnnnnnnnnnnnnnnnnnnnnnnnnnnnnnnnnnnnnnnnnnnnnnnnnnnnnnnnnnnnnnnnnnnnnnnnnnnnnnnnnnnnnnnnnnnnnnnnnnnnnnnnnnnnnnnnnnnnnnnnnnnnnnnnnnnnnnnnnnnnnnnnnnnnnnnnnnnnnnnnnnnnnnnnnnnnnnnnnnnnnnnnnnnnnnnnnnnnnnnnnnnnnnnnnnnnnnnnnnnnnnnnnnnnnnnnnnnnnnnnnnnnnnnnnnnnnnnnnnnnnnnnnnnnnnnnnnnnnnnnnnnnnnnnnnnnnnnnnnnnnnnnnnnnnnnnnnnnnnnnnnnnnnnnnnnnnnnnnnnnnnnnnnnnnnnnnnnnnnnnnnnnnnnnnnnnnnnnnnnnnnnnnnnnnnnnnnnnnnnnnnnnnnnnnnnnnnnnnnnnnnnnnnnnnnnnnnnnnnnnnnnnnnnnnnnnnnnnnnnnnnnnnnnnnnnnnnnnnnnnnnnnnnnnnnnnnnnnnnnnnnnnnnnnnnnnnnnnnnnnnnnnnnnnnnnnnnnnnnnnnnnnnnnnnnnnnnnnnnnnnnnnnnnnnnnnnnnnnnnnnnnnnnnnnnnnnnnnnnnnnnnnnnnnnnnnnnnnnnnnnnnnnnnnnnnnnnnnnnnnnnnnnnnnnnnnnnnnnnnnnnnnnnnnnnnnnnnnnnnnnnnnnnnnnnnnnnnnnnnnnnnnnnnnnnnnnnnnnnnnnnnnnnnnnnnnnnnnnnnnnnnnnnnnnnnnnnnnnnnnnnnnnnnnnnnnnnnnnnnnnnnnnnnnnnnnnnnnnnnnnnnnnnnnnnnnnnnnnnnnnnnnnnnnnnnnnnnnnnnnnnnnnnnnnnnnnnnnnnnnnnnnnnnnnnnnnnnnnnnnnnnnnnnnnnnnnnnnnnnnnnnnnnnnnnnnnnnnnnnnnnnnnnnnnnnnnnnnnnnnnnnnnnnnnnnnnnnnnnnnnnnnnnnnnnnnnnnnnnnnnnnnnnnnnnnnnnnnnnnnnnnnnnnnnnnnnnnnnnnnnnnnnnnnnnnnnnnnnnnnnnnnnnnnnnnnnnnnnnnnnnnnnnnnnnnnnnnnnnnnnnnnnnnnnnnnnnnnnnnnnnnnnnnnnnnnnnnnnnnnnnnnnnnnnnnnnnnnnnnnnnnnnnnnnnnnnnnnnnnnnnnnnnnnnnnnnnnnnnnnnnnnnnnnnnnnnnnnnnnnnnnnnnnnnnnnnnnnnnnnnnnnnnnnnnnnnnnnnnnnnnnnnnnnnnnnnnnnnnnnnnnnnnnnnnnnnnnnnnnnnnnnnnnnnnnnnnnnnnnnnnnnnnnnnnnnnnnnnnnnnnnnnnnnnnnnnnnnnnnnnnnnnnnnnnnnnnnnnnnnnnnnnnnnnnnnnnnnnnnnnnnnnnnnnnnnnnnnnnnnnnnnnnnnnnnnnnnnnnnnnnnnnnnnnnnnnnnnnnnnnnnnnnnnnnnnnnnnnnnnnnnnnnnnnnnnnnnnnnnnnnnnnnnnnnnnnnnnnnnnnnnnnnnnnnnnnnnnnnnnnnnnnnnnnnnnnnnnnnnnnnnnnnnnnnnnnnnnnnnnnnnnnnnnnnnnnnnnnnnnnnnnnnnnnnnnnnnnnnnnnnnnnnnnnnnnnnnnnnnnnnnnnnnnnnnnnnnnnnnnnnnnnnnnnnnnnnnnnnnnnnnnnnnnnnnnnnnnnnnnnnnnnnnnnnnnnnnnnnnnnnnnnnnnnnnnnnnnnnnnnnnnnnnnnnnnnnnnnnnnnnnnnnnnnnnnnnnnnnnnnnnnnnnnnnnnnnnnnnnnnnnnnnnnnnnnnnnnnnnnnnnnnnnnnnnnnnnnnnnnnnnnnnnnnnnnnnnnnnnnnnnnnnnnnnnnnnnnnnnnnnnnnnnnnnnnnnnnnnnnnnnnnnnnnnnnnnnnnnnnnnnnnnnnnnnnnnnnnnnnnnnnnnnnnnnnnnnnnnnnnnnnnnnnnnnnnnnnnnnnnnnnnnnnnnnnnnnnnnnnnnnnnnnnnnnnnnnnnnnnnnnnnnnnnnnnnnnnnnnnnnnnnnnnnnnnnnnnnnnnnnnnnnnnnnnnnnnnnnnnnnnnnnnnnnnnnnnnnnnnnnnnnnnnnnnnnnnnnnnnnnnnnnnnnnnnnnnnnnnnnnnnnnnnnnnnnnnnnnnnnnnnnnnnnnnnnnnnnnnnnnnnnnnnnnnnnnnnnnnnnnnnnnnnnnnnnnnnnnnnnnnnnnnnnnnnnnnnnnnnnnnnnnnnnnnnnnnnnnnnnnnnnnnnnnnnnnnnnnnnnnnnnnnnnnnnnnnnnnnnnnnnnnnnnnnnnnnnnnnnnnnnnnnnnnnnnnnnnnnnnnnnnnnnnnnnnnnnnnnnnnnnnnnnnnnnnnnnnnnnnnnnnnnnnnnnnnnnnnnnnnnnnnnnnnnnnnnnnnnnnnnnnnnnnnnnnnnnnnnnnnnnnnnnnnnnnnnnnnnnnnnnnnnnnnnnnnnnnnnnnnnnnnnnnnnnnnnnnnnnnnnnnnnnnnnnnnnnnnnnnnnnnnnnnnnnnnnnnnnnnnnnnnnnnnnnnnnnnnnnnnnnnnnnnnnnnnnnnnnnnnnnnnnnnnnnnnnnnnnnnnnnnnnnnnnnnnnnnnnnnnnnnnnnnnnnnnnnnnnnnnnnnnnnnnnnnnnnnnnnnnnnnnnnnnnnnnnnnnnnnnnnnnnnnnnnnnnnnnnnnnnnnnnnnnnnnnnnnnnnnnnnnnnnnnnnnnnnnnnnnnnnnnnnnnnnnnnnnnnnnnnnnnnnnnnnnnnnnnnnnnnnnnnnnnnnnnnnnnnnnnnnnnnnnnnnnnnnnnnnnnnnnnnnnnnnnnnnnnnnnnnnnnnnnnnnnnnnnnnnnnnnnnnnnnnnnnnnnnnnnnnnnnnnnnnnnnnnnnnnnnnnnnnnnnnnnnnnnnnnnnnnnnnnnnnnnnnnnnnnnnnnnnnnnnnnnnnnnnnnnnnnnnnnnnnnnnnnnnnnnnnnnnnnnnnnnnnnnnnnnnnnnnnnnnnnnnnnnnnnnnnnnnnnnnnnnnnnnnnnnnnnnnnnnnnnnnnnnnnnnnnnnnnnnnnnnnnnnnnnnnnnnnnnnnnnnnnnnnnnnnnnnnnnnnnnnnnnnnnnnnnnnnnnnnnnnnnnnnnnnnnnnnnnnnnnnnnnnnnnnnnnnnnnnnnnnnnnnnnnnnnnnnnnnnnnnnnnnnnnnnnnnnnnnnnnnnnnnnnnnnnnnnnnnnnnnnnnnnnnnnnnnnnnnnnnnnnnnnnnnnnnnnnnnnnnnnnnnnnnnnnnnnnnnnnnnnnnnnnnnnnnnnnnnnnnnnnnnnnnnnnnnnnnnnnnnnnnnnnnnnnnnnnnnnnnnnnnnnnnnnnnnnnnnnnnnnnnnnnnnnnnnnnnnnnnnnnnnnnnnnnnnnnnnnnnnnnnnnnnnnnnnnnnnnnnnnnnnnnnnnnnnnnnnnnnnnnnnnnnnnnnnnnnnnnnnnnnnnnnnnnnnnnnnnnnnnnnnnnnnnnnnnnnnnnnnnnnnnnnnnnnnnnnnnnnnnnnnnnnnnnnnnnnnnnnnnnnnnnnnnnnnnnnnnnnnnnnnnnnnnnnnnnnnnnnnnnnnnnnnnnnnnnnnnnnnnnnnnnnnnnnnnnnnnnnnnnnnnnnnnnnnnnnnnnnnnnnnnnnnnnnnnnnnnnnnnnnnnnnnnnnnnnnnnnnnnnnnnnnnnnnnnnnnnnnnnnnnnnnnnnnnnnnnnnnnnnnnnnnnnnnnnnnnnnnnnnnnnnnnnnnnnnnnnnnnnnnnnnnnnnnnnnnnnnnnnnnnnnnnnnnnnnnnnnnnnnnnnnnnnnnnnnnnnnnnnnnnnnnnnnnnnnnnnnnnnnnnnnnnnnnnnnnnnnnnnnnnnnnnnnnnnnnnnnnnnnnnnnnnnnnnnnnnnnnnnnnnnnnnnnnnnnnnnnnnnnnnnnnnnnnnnnnnnnnnnnnnnnnnnnnnnnnnnnnnnnnnnnnnnnnnnnnnnnnnnnnnnnnnnnnnnnnnnnnnnnnnnnnnnnnnnnnnnnnnnnnnnnnnnnnnnnnnnnnnnnnnnnnnnnnnnnnnnnnnnnnnnnnnnnnnnnnnnnnnnnnnnnnnnnnnnnnnnnnnnnnnnnnnnnnnnnnnnnnnnnnnnnnnnnnnnnnnnnnnnnnnnnnnnnnnnnnnnnnnnnnnnnnnnnnnnnnnnnnnnnnnnnnnnnnnnnnnnnnnnnnnnnnnnnnnnnnnnnnnnnnnnnnnnnnnnnnnnnnnnnnnnnnnnnnnnnnnnnnnnnnnnnnnnnnnnnnnnnnnnnnnnnnnnnnnnnnnnnnnnnnnnnnnnnnnnnnnnnnnnnnnnnnnnnnnnnnnnnnnnnnnnnnnnnnnnnnnnnnnnnnnnnnnnnnnnnnnnnnnnnnnnnnnnnnnnnnnnnnnnnnnnnnnnnnnnnnnnnnnnnnnnnnnnnnnnnnnnnnnnnnnnnnnnnnnnnnnnnnnnnnnnnnnnnnnnnnnnnnnnnnnnnnnnnnnnnnnnnnnnnnnnnnnnnnnnnnnnnnnnnnnnnnnnnnnnnnnnnnnnnnnnnnnnnnnnnnnnnnnnnnnnnnnnnnnnnnnnnnnnnnnnnnnnnnnnnnnnnnnnnnnnnnnnnnnnnnnnnnnnnnnnnnnnnnnnnnnnnnnnnnnnnnnnnnnnnnnnnnnnnnnnnnnnnnnnnnnnnnnnnnnnnnnnnnnnnnnnnnnnnnnnnnnnnnnnnnnnnnnnnnnnnnnnnnnnnnnnnnnnnnnnnnnnnnnnnnnnnnnnnnnnnnnnnnnnnnnnnnnnnnnnnnnnnnnnnnnnnnnnnnnnnnnnnnnnnnnnnnnnnnnnnnnnnnnnnnnnnnnnnnnnnnnnnnnnnnnnnnnnnnnnnnnnnnnnnnnnnnnnnnnnnnnnnnnnnnnnnnnnnnnnnnnnnnnnnnnnnnnnnnnnnnnnnnnnnnnnnnnnnnnnnnnnnnnnnnnnnnnnnnnnnnnnnnnnnnnnnnnnnnnnnnnnnnnnnnnnnnnnnnnnnnnnnnnnnnnnnnnnnnnnnnnnnnnnnnnnnnnnnnnnnnnnnnnnnnnnnnnnnnnnnnnnnnnnnnnnnnnnnnnnnnnnnnnnnnnnnnnnnnnnnnnnnnnnnnnnnnnnnnnnnnnnnnnnnnnnnnnnnnnnnnnnnnnnnnnnnnnnnnnnnnnnnnnnnnnnnnnnnnnnnnnnnnnnnnnnnnnnnnnnnnnnnnnnnnnnnnnnnnnnnnnnnnnnnnnnnnnnnnnnnnnnnnnnnnnnnnnnnnnnnnnnnnnnnnnnnnnnnnnnnnnnnnnnnnnnnnnnnnnnnnnnnnnnnnnnnnnnnnnnnnnnnnnnnnnnnnnnnnnnnnnnnnnnnnnnnnnnnnnnnnnnnnnnnnnnnnnnnnnnnnnnnnnnnnnnnnnnnnnnnnnnnnnnnnnnnnnnnnnnnnnnnnnnnnnnnnnnnnnnnnnnnnnnnnnnnnnnnnnnnnnnnnnnnnnnnnnnnnnnnnnnnnnnnnnnnnnnnnnnnnnnnnnnnnnnnnnnnnnnnnnnnnnnnnnnnnnnnnnnnnnnnnnnnnnnnnnnnnnnnnnnnnnnnnnnnnnnnnnnnnnnnnnnnnnnnnnnnnnnnnnnnnnnnnnnnnnnnnnnnnnnnnnnnnnnnnnnnnnnnnnnnnnnnnnnnnnnnnnnnnnnnnnnnnnnnnnnnnnnnnnnnnnnnnnnnnnnnnnnnnnnnnnnnnnnnnnnnnnnnnnnnnnnnnnnnnnnnnnnnnnnnnnnnnnnnnnnnnnnnnnnnnnnnnnnnnnnnnnnnnnnnnnnnnnnnnnnnnnnnnnnnnnnnnnnnnnnnnnnnnnnnnnnnnnnnnnnnnnnnnnnnnnnnnnnnnnnnnnnnnnnnnnnnnnnnnnnnnnnnnnnnnnnnnnnnnnnnnnnnnnnnnnnnnnnnnnnnnnnnnnnnnnnnnnnnnnnnnnnnnnnnnnnnnnnnnnnnnnnnnnnnnnnnnnnnnnnnnnnnnnnnnnnnnnnnnnnnnnnnnnnnnnnnnnnnnnnnnnnnnnnnnnnnnnnnnnnnnnnnnnnnnnnnnnnnnnnnnnnnnnnnnnnnnnnnnnnnnnnnnnnnnnnnnnnnnnnnnnnnnnnnnnnnnnnnnnnnnnnnnnnnnnnnnnnnnnnnnnnnnnnnnnnnnnnnnnnnnnnnnnnnnnnnnnnnnnnnnnnnnnnnnnnnnnnnnnnnnnnnnnnnnnnnnnnnnnnnnnnnnnnnnnnnnnnnnnnnnnnnnnnnnnnnnnnnnnnnnnnnnnnnnnnnnnnnnnnnnnnnnnnnnnnnnnnnnnnnnnnnnnnnnnnnnnnnnnnnnnnnnnnnnnnnnnnnnnnnnnnnnnnnnnnnnnnnnnnnnnnnnnnnnnnnnnnnnnnnnnnnnnnnnnnnnnnnnnnnnnnnnnnnnnnnnnnnnnnnnnnnnnnnnnnnnnnnnnnnnnnnnnnnnnnnnnnnnnnnnnnnnnnnnnnnnnnnnnnnnnnnnnnnnnnnnnnnnnnnnnnnnnnnnnnnnnnnnnnnnnnnnnnnnnnnnnnnnnnnnnnnnnnnnnnnnnnnnnnnnnnnnnnnnnnnnnnnnnnnnnnnnnnnnnnnnnnnnnnnnnnnnnnnnnnnnnnnnnnnnnnnnnnnnnnnnnnnnnnnnnnnnnnnnnnnnnnnnnnnnnnnnnnnnnnnnnnnnnnnnnnnnnnnnnnnnnnnnnnnnnnnnnnnnnnnnnnnnnnnnnnnnnnnnnnnnnnnnnnnnnnnnnnnnnnnnnnnnnnnnnnnnnnnnnnnnnnnnnnnnnnnnnnnnnnnnnnnnnnnnnnnnnnnnnnnnnnnnnnnnnnnnnnnnnnnnnnnnnnnnnnnnnnnnnnnnnnnnnnnnnnnnnnnnnnnnnnnnnnnnnnnnnnnnnnnnnnnnnnnnnnnnnnnnnnnnnnnnnnnnnnnnnnnnnnnnnnnnnnnnnnnnnnnnnnnnnnnnnnnnnnnnnnnnnnnnnnnnnnnnnnnnnnnnnnnnnnnnnnnnnnnnnnnnnnnnnnnnnnnnnnnnnnnnnnnnnnnnnnnnnnnnnnnnnnnnnnnnnnnnnnnnnnnnnnnnnnnnnnnnnnnnnnnnnnnnnnnnnnnnnnnnnnnnnnnnnnnnnnnnnnnnnnnnnnnnnnnnnnnnnnnnnnnnnnnnnnnnnnnnnnnnnnnnnnnnnnnnnnnnnnnnnnnnnnnnnnnnnnnnnnnnnnnnnnnnnnnnnnnnnnnnnnnnnnnnnnnnnnnnnnnnnnnnnnnnnnnnnnnnnnnnnnnnnnnnnnnnnnnnnnnnnnnnnnnnnnnnnnnnnnnnnnnnnnnnnnnnnnnnnnnnnnnnnnnnnnnnnnnnnnnnnnnnnnnnnnnnnnnnnnnnnnnnnnnnnnnnnnnnnnnnnnnnnnnnnnnnnnnnnnnnnnnnnnnnnnnnnnnnnnnnnnnnnnnnnnnnnnnnnnnnnnnnnnnnnnnnnnnnnnnnnnnnnnnnnnnnnnnnnnnnnnnnnnnnnnnnnnnnnnnnnnnnnnnnnnnnnnnnnnnnnnnnnnnnnnnnnnnnnnnnnnnnnnnnnnnnnnnnnnnnnnnnnnnnnnnnnnnnnnnnnnnnnnnnnnnnnnnnnnnnnnnnnnnnnnnnnnnnnnnnnnnnnnnnnnnnnnnnnnnnnnnnnnnnnnnnnnnnnnnnnnnnnnnnnnnnnnnnnnnnnnnnnnnnnnnnnnnnnnnnnnnnnnnnnnnnnnnnnnnnnnnnnnnnnnnnnnnnnnnnnnnnnnnnnnnnnnnnnnnnnnnnnnnnnnnnnnnnnnnnnnnnnnnnnnnnnnnnnnnnnnnnnnnnnnnnnnnnnnnnnnnnnnnnnnnnnnnnnnnnnnnnnnnnnnnnnnnnnnnnnnnnnnnnnnnnnnnnnnnnnnnnnnnnnnnnnnnnnnnnnnnnnnnnnnnnnnnnnnnnnnnnnnnnnnnnnnnnnnnnnnnnnnnnnnnnnnnnnnnnnnnnnnnnnnnnnnnnnnnnnnnnnnnnnnnnnnnnnnnnnnnnnnnnnnnnnnnnnnnnnnnnnnnnnnnnnnnnnnnnnnnnnnnnnnnnnnnnnnnnnnnnnnnnnnnnnnnnnnnnnnnnnnnnnnnnnnnnnnnnnnnnnnnnnnnnnnnnnnnnnnnnnnnnnnnnnnnnnnnnnnnnnnnnnnnnnnnnnnnnnnnnnnnnnnnnnnnnnnnnnnnnnnnnnnnnnnnnnnnnnnnnnnnnnnnnnnnnnnnnnnnnnnnnnnnnnnnnnnnnnnnnnnnnnnnnnnnnnnnnnnnnnnnnnnnnnnnnnnnnnnnnnnnnnnnnnnnnnnnnnnnnnnnnnnnnnnnnnnnnnnnnnnnnnnnnnnnnnnnnnnnnnnnnnnnnnnnnnnnnnnnnnnnnnnnnnnnnnnnnnnnnnnnnnnnnnnnnnnnnnnnnnnnnnnnnnnnnnnnnnnnnnnnnnnnnnnnnnnnnnnnnnnnnnnnnnnnnnnnnnnnnnnnnnnnnnnnnnnnnnnnnnnnnnnnnnnnnnnnnnnnnnnnnnnnnnnnnnnnnnnnnnnnnnnnnnnnnnnnnnnnnnnnnnnnnnnnnnnnnnnnnnnnnnnnnnnnnnnnnnnnnnnnnnnnnnnnnnnnnnnnnnnnnnnnnnnnnnnnnnnnnnnnnnnnnnnnnnnnnnnnnnnnnnnnnnnnnnnnnnnnnnnnnnnnnnnnnnnnnnnnnnnnnnnnnnnnnnnnnnnnnnnnnnnnnnnnnnnnnnnnnnnnnnnnnnnnnnnnnnnnnnnnnnnnnnnnnnnnnnnnnnnnnnnnnnnnnnnnnnnnnnnnnnnnnnnnnnnnnnnnnnnnnnnnnnnnnnnnnnnnnnnnnnnnnnnnnnnnnnnnnnnnnnnnnnnnnnnnnnnnnnnnnnnnnnnnnnnnnnnnnnnnnnnnnnnnnnnnnnnnnnnnnnnnnnnnnnnnnnnnnnnnnnnnnnnnnnnnnnnnnnnnnnnnnnnnnnnnnnnnnnnnnnnnnnnnnnnnnnnnnnnnnnnnnnnnnnnnnnnnnnnnnnnnnnnnnnnnnnnnnnnnnnnnnnnnnnnnnnnnnnnnnnnnnnnnnnnnnnnnnnnnnnnnnnnnnnnnnnnnnnnnnnnnnnnnnnnnnnnnnnnnnnnnnnnnnnnnnnnnnnnnnnnnnnnnnnnnnnnnnnnnnnnnnnnnnnnnnnnnnnnnnnnnnnnnnnnnnnnnnnnnnnnnnnnnnnnnnnnnnnnnnnnnnnnnnnnnnnnnnnnnnnnnnnnnnnnnnnnnnnnnnnnnnnnnnnnnnnnnnnnnnnnnnnnnnnnnnnnnnnnnnnnnnnnnnnnnnnnnnnnnnnnnnnnnnnnnnnnnnnnnnnnnnnnnnnnnnnnnnnnnnnnnnnnnnnnnnnnnnnnnnnnnnnnnnnnnnnnnnnnnnnnnnnnnnnnnnnnnnnnnnnnnnnnnnnnnnnnnnnnnnnnnnnnnnnnnnnnnnnnnnnnnnnnnnnnnnnnnnnnnnnnnnnnnnnnnnnnnnnnnnnnnnnnnnnnnnnnnnnnnnnnnnnnnnnnnnnnnnnnnnnnnnnnnnnnnnnnnnnnnnnnnnnnnnnnnnnnnnnnnnnnnnnnnnnnnnnnnnnnnnnnnnnnnnnnnnnnnnnnnnnnnnnnnnnnnnnnnnnnnnnnnnnnnnnnnnnnnnnnnnnnnnnnnnnnnnnnnnnnnnnnnnnnnnnnnnnnnnnnnnnnnnnnnnnnnnnnnnnnnnnnnnnnnnnnnnnnnnnnnnnnnnnnnnnnnnnnnnnnnnnnnnnnnnnnnnnnnnnnnnnnnnnnnnnnnnnnnnnnnnnnnnnnnnnnnnnnnnnnnnnnnnnnnnnnnnnnnnnnnnnnnnnnnnnnnnnnnnnnnnnnnnnnnnnnnnnnnnnnnnnnnnnnnnnnnnnnnnnnnnnnnnnnnnnnnnnnnnnnnnnnnnnnnnnnnnnnnnnnnnnnnnnnnnnnnnnnnnnnnnnnnnnnnnnnnnnnnnnnnnnnnnnnnnnnnnnnnnnnnnnnnnnnnnnnnnnnnnnnnnnnnnnnnnnnnnnnnnnnnnnnnnnnnnnnnnnnnnnnnnnnnnnnnnnnnnnnnnnnnnnnnnnnnnnnnnnnnnnnnnnnnnnnnnnnnnnnnnnnnnnnnnnnnnnnnnnnnnnnnnnnnnnnnnnnnnnnnnnnnnnnnnnnnnnnnnnnnnnnnnnnnnnnnnnnnnnnnnnnnnnnnnnnnnnnnnnnnnnnnnnnnnnnnnnnnnnnnnnnnnnnnnnnnnnnnnnnnnnnnnnnnnnnnnnnnnnnnnnnnnnnnnnnnnnnnnnnnnnnnnnnnnnnnnnnnnnnnnnnnnnnnnnnnnnnnnnnnnnnnnnnnnnnnnnnnnnnnnnnnnnnnnnnnnnnnnnnnnnnnnnnnnnnnnnnnnnnnnnnnnnnnnnnnnnnnnnnnnnnnnnnnnnnnnnnnnnnnnnnnnnnnnnnnnnnnnnnnnnnnnnnnnnnnnnnnnnnnnnnnnnnnnnnnnnnnnnnnnnnnnnnnnnnnnnnnnnnnnnnnnnnnnnnnnnnnnnnnnnnnnnnnnnnnnnnnnnnnnnnnnnnnnnnnnnnnnnnnnnnnnnnnnnnnnnnnnnnnnnnnnnnnnnnnnnnnnnnnnnnnnnnnnnnnnnnnnnnnnnnnnnnnnnnnnnnnnnnnnnnnnnnnnnnnnnnnnnnnnnnnnnnnnnnnnnnnnnnnnnnnnnnnnnnnnnnnnnnnnnnnnnnnnnnnnnnnnnnnnnnnnnnnnnnnnnnnnnnnnnnnnnnnnnnnnnnnnnnnnnnnnnnnnnnnnnnnnnnnnnnnnnnnnnnnnnnnnnnnnnnnnnnnnnnnnnnnnnnnnnnnnnnnnnnnnnnnnnnnnnnnnnnnnnnnnnnnnnnnnnnnnnnnnnnnnnnnnnnnnnnnnnnnnnnnnnnnnnnnnnnnnnnnnnnnnnnnnnnnnnnnnnnnnnnnnnnnnnnnnnnnnnnnnnnnnnnnnnnnnnnnnnnnnnnnnnnnnnnnnnnnnnnnnnnnnnnnnnnnnnnnnnnnnnnnnnnnnnnnnnnnnnnnnnnnnnnnnnnnnnnnnnnnnnnnnnnnnnnnnnnnnnnnnnnnnnnnnnnnnnnnnnnnnnnnnnnnnnnnnnnnnnnnnnnnnnnnnnnnnnnnnnnnnnnnnnnnnnnnnnnnnnnnnnnnnnnnnnnnnnnnnnnnnnnnnnnnnnnnnnnnnnnnnnnnnnnnnnnnnnnnnnnnnnnnnnnnnnnnnnnnnnnnnnnnnnnnnnnnnnnnnnnnnnnnnnnnnnnnnnnnnnnnnnnnnnnnnnnnnnnnnnnnnnnnnnnnnnnnnnnnnnnnnnnnnnnnnnnnnnnnnnnnnnnnnnnnnnnnnnnnnnnnnnnnnnnnnnnnnnnnnnnnnnnnnnnnnnnnnnnnnnnnnnnnnnnnnnnnnnnnnnnnnnnnnnnnnnnnnnnnnnnnnnnnnnnnnnnnnnnnnnnnnnnnnnnnnnnnnnnnnnnnnnnnnnnnnnnnnnnnnnnnnnnnnnnnnnnnnnnnnnnnnnnnnnnnnnnnnnnnnnnnnnnnnnnnnnnnnnnnnnnnnnnnnnnnnnnnnnnnnnnnnnnnnnnnnnnnnnnnnnnnnnnnnnnnnnnnnnnnnnnnnnnnnnnnnnnnnnnnnnnnnnnnnnnnnnnnnnnnnnnnnnnnnnnnnnnnnnnnnnnnnnnnnnnnnnnnnnnnnnnnnnnnnnnnnnnnnnnnnnnnnnnnnnnnnnnnnnnnnnnnnnnnnnnnnnnnnnnnnnnnnnnnnnnnnnnnnnnnnnnnnnnnnnnnnnnnnnnnnnnnnnnnnnnnnnnnnnnnnnnnnnnnnnnnnnnnnnnnnnnnnnnnnnnnnnnnnnnnnnnnnnnnnnnnnnnnnnnnnnnnnnnnnnnnnnnnnnnnnnnnnnnnnnnnnnnnnnnnnnnnnnnnnnnnnnnnnnnnnnnnnnnnnnnnnnnnnnnnnnnnnnnnnnnnnnnnnnnnnnnnnnnnnnnnnnnnnnnnnnnnnnnnnnnnnnnnnnnnnnnnnnnnnnnnnnnnnnnnnnnnnnnnnnnnnnnnnnnnnnnnnnnnnnnnnnnnnnnnnnnnnnnnnnnnnnnnnnnnnnnnnnnnnnnnnnnnnnnnnnnnnnnnnnnnnnnnnnnnnnnnnnnnnnnnnnnnnnnnnnnnnnnnnnnnnnnnnnnnnnnnnnnnnnnnnnnnnnnnnnnnnnnnnnnnnnnnnnnnnnnnnnnnnnnnnnnnnnnnnnnnnnnnnnnnnnnnnnnnnnnnnnnnnnnnnnnnnnnnnnnnnnnnnnnnnnnnnnnnnnnnnnnnnnnnnnnnnnnnnnnnnnnnnnnnnnnnnnnnnnnnnnnnnnnnnnnnnnnnnnnnnnnnnnnnnnnnnnnnnnnnnnnnnnnnnnnnnnnnnnnnnnnnnnnnnnnnnnnnnnnnnnnnnnnnnnnnnnnnnnnnnnnnnnnnnnnnnnnnnnnnnnnnnnnnnnnnnnnnnnnnnnnnnnnnnnnnnnnnnnnnnnnnnnnnnnnnnnnnnnnnnnnnnnnnnnnnnnnnnnnnnnnnnnnnnnnnnnnnnnnnnnnnnnnnnnnnnnnnnnnnnnnnnnnnnnnnnnnnnnnnnnnnnnnnnnnnnnnnnnnnnnnnnnnnnnnnnnnnnnnnnnnnnnnnnnnnnnnnnnnnnnnnnnnnnnnnnnnnnnnnnnnnnnnnnnnnnnnnnnnnnnnnnnnnnnnnnnnnnnnnnnnnnnnnnnnnnnnnnnnnnnnnnnnnnnnnnnnnnnnnnnnnnnnnnnnnnnnnnnnnnnnnnnnnnnnnnnnnnnnnnnnnnnnnnnnnnnnnnnnnnnnnnnnnnnnnnnnnnnnnnnnnnnnnnnnnnnnnnnnnnnnnnnnnnnnnnnnnnnnnnnnnnnnnnnnnnnnnnnnnnnnnnnnnnnnnnnnnnnnnnnnnnnnnnnnnnnnnnnnnnnnnnnnnnnnnnnnnnnnnnnnnnnnnnnnnnnnnnnnnnnnnnnnnnnnnnnnnnnnnnnnnnnnnnnnnnnnnnnnnnnnnnnnnnnnnnnnnnnnnnnnnnnnnnnnnnnnnnnnnnnnnnnnnnnnnnnnnnnnnnnnnnnnnnnnnnnnnnnnnnnnnnnnnnnnnnnnnnnnnnnnnnnnnnnnnnnnnnnnnnnnnnnnnnnnnnnnnnnnnnnnnnnnnnnnnnnnnnnnnnnnnnnnnnnnnnnnnnnnnnnnnnnnnnnnnnnnnnnnnnnnnnnnnnnnnnnnnnnnnnnnnnnnnnnnnnnnnnnnnnnnnnnnnnnnnnnnnnnnnnnnnnnnnnnnnnnnnnnnnnnnnnnnnnnnnnnnnnnnnnnnnnnnnnnnnnnnnnnnnnnnnnnnnnnnnnnnnnnnnnnnnnnnnnnnnnnnnnnnnnnnnnnnnnnnnnnnnnnnnnnnnnnnnnnnnnnnnnnnnnnnnnnnnnnnnnnnnnnnnnnnnnnnnnnnnnnnnnnnnnnnnnnnnnnnnnnnnnnnnnnnnnnnnnnnnnnnnnnnnnnnnnnnnnnnnnnnnnnnnnnnnnnnnnnnnnnnnnnnnnnnnnnnnnnnnnnnnnnnnnnnnnnnnnnnnnnnnnnnnnnnnnnnnnnnnnnnnnnnnnnnnnnnnnnnnnnnnnnnnnnnnnnnnnnnnnnnnnnnnnnnnnnnnnnnnnnnnnnnnnnnnnnnnnnnnnnnnnnnnnnnnnnnnnnnnnnnnnnnnnnnnnnnnnnnnnnnnnnnnnnnnnnnnnnnnnnnnnnnnnnnnnnnnnnnnnnnnnnnnnnnnnnnnnnnnnnnnnnnnnnnnnnnnnnnnnnnnnnnnnnnnnnnnnnnnnnnnnnnnnnnnnnnnnnnnnnnnnnnnnnnnnnnnnnnnnnnnnnnnnnnnnnnnnnnnnnnnnnnnnnnnnnnnnnnnnnnnnnnnnnnnnnnnnnnnnnnnnnnnnnnnnnnnnnnnnnnnnnnnnnnnnnnnnnnnnnnnnnnnnnnnnnnnnnnnnnnnnnnnnnnnnnnnnnnnnnnnnnnnnnnnnnnnnnnnnnnnnnnnnnnnnnnnnnnnnnnnnnnnnnnnnnnnnnnnnnnnnnnnnnnnnnnnnnnnnnnnnnnnnnnnnnnnnnnnnnnnnnnnnnnnnnnnnnnnnnnnnnnnnnnnnnnnnnnnnnnnnnnnnnnnnnnnnnnnnnnnnnnnnnnnnnnnnnnnnnnnnnnnnnnnnnnnnnnnnnnnnnnnnnnnnnnnnnnnnnnnnnnnnnnnnnnnnnnnnnnnnnnnnnnnnnnnnnnnnnnnnnnnnnnnnnnnnnnnnnnnnnnnnnnnnnnnnnnnnnnnnnnnnnnnnnnnnnnnnnnnnnnnnnnnnnnnnnnnnnnnnnnnnnnnnnnnnnnnnnnnnnnnnnnnnnnnnnnnnnnnnnnnnnnnnnnnnnnnnnnnnnnnnnnnnnnnnnnnnnnnnnnnnnnnnnnnnnnnnnnnnnnnnnnnnnnnnnnnnnnnnnnnnnnnnnnnnnnnnnnnnnnnnnnnnnnnnnnnnnnnnnnnnnnnnnnnnnnnnnnnnnnnnnnnnnnnnnnnnnnnnnnnnnnnnnnnnnnnnnnnnnnnnnnnnnnnnnnnnnnnnnnnnnnnnnnnnnnnnnnnnnnnnnnnnnnnnnnnnnnnnnnnnnnnnnnnnnnnnnnnnnnnnnnnnnnnnnnnnnnnnnnnnnnnnnnnnnnnnnnnnnnnnnnnnnnnnnnnnnnnnnnnnnnnnnnnnnnnnnnnnnnnnnnnnnnnnnnnnnnnnnnnnnnnnnnnnnnnnnnnnnnnnnnnnnnnnnnnnnnnnnnnnnnnnnnnnnnnnnnnnnnnnnnnnnnnnnnnnnnnnnnnnnnnnnnnnnnnnnnnnnnnnnnnnnnnnnnnnnnnnnnnnnnnnnnnnnnnnnnnnnnnnnnnnnnnnnnnnnnnnnnnnnnnnnnnnnnnnnnnnnnnnnnnnnnnnnnnnnnnnnnnnnnnnnnnnnnnnnnnnnnnnnnnnnnnnnnnnnnnnnnnnnnnnnnnnnnnnnnnnnnnnnnnnnnnnnnnnnnnnnnnnnnnnnnnnnnnnnnnnnnnnnnnnnnnnnnnnnnnnnnnnnnnnnnnnnnnnnnnnnnnnnnnnnnnnnnnnnnnnnnnnnnnnnnnnnnnnnnnnnnnnnnnnnnnnnnnnnnnnnnnnnnnnnnnnnnnnnnnnnnnnnnnnnnnnnnnnnnnnnnnnnnnnnnnnnnnnnnnnnnnnnnnnnnnnnnnnnnnnnnnnnnnnnnnnnnnnnnnnnnnnnnnnnnnnnnnnnnnnnnnnnnnnnnnnnnnnnnnnnnnnnnnnnnnnnnnnnnnnnnnnnnnnnnnnnnnnnnnnnnnnnnnnnnnnnnnnnnnnnnnnnnnnnnnnnnnnnnnnnnnnnnnnnnnnnnnnnnnnnnnnnnnnnnnnnnnnnnnnnnnnnnnnnnnnnnnnnnnnnnnnnnnnnnnnnnnnnnnnnnnnnnnnnnnnnnnnnnnnnnnnnnnnnnnnnnnnnnnnnnnnnnnnnnnnnnnnnnnnnnnnnnnnnnnnnnnnnnnnnnnnnnnnnnnnnnnnnnnnnnnnnnnnnnnnnnnnnnnnnnnnnnnnnnnnnnnnnnnnnnnnnnnnnnnnnnnnnnnnnnnnnnnnnnnnnnnnnnnnnnnnnnnnnnnnnnnnnnnnnnnnnnnnnnnnnnnnnnnnnnnnnnnnnnnnnnnnnnnnnnnnnnnnnnnnnnnnnnnnnnnnnnnnnnnnnnnnnnnnnnnnnnnnnnnnnnnnnnnnnnnnnnnnnnnnnnnnnnnnnnnnnnnnnnnnnnnnnnnnnnnnnnnnnnnnnnnnnnnnnnnnnnnnnnnnnnnnnnnnnnnnnnnnnnnnnnnnnnnnnnnnnnnnnnnnnnnnnnnnnnnnnnnnnnnnnnnnnnnnnnnnnnnnnnnnnnnnnnnnnnnnnnnnnnnnnnnnnnnnnnnnnnnnnnnnnnnnnnnnnnnnnnnnnnnnnnnnnnnnnnnnnnnnnnnnnnnnnnnnnnnnnnnnnnnnnnnnnnnnnnnnnnnnnnnnnnnnnnnnnnnnnnnnnnnnnnnnnnnnnnnnnnnnnnnnnnnnnnnnnnnnnnnnnnnnnnnnnnnnnnnnnnnnnnnnnnnnnnnnnnnnnnnnnnnnnnnnnnnnnnnnnnnnnnnnnnnnnnnnnnnnnnnnnnnnnnnnnnnnnnnnnnnnnnnnnnnnnnnnnnnnnnnnnnnnnnnnnnnnnnnnnnnnnnnnnnnnnnnnnnnnnnnnnnnnnnnnnnnnnnnnnnnnnnnnnnnnnnnnnnnnnnnnnnnnnnnnnnnnnnnnnnnnnnnnnnnnnnnnnnnnnnnnnnnnnnnnnnnnnnnnnnnnnnnnnnnnnnnnnnnnnnnnnnnnnnnnnnnnnnnnnnnnnnnnnnnnnnnnnnnnnnnnnnnnnnnnnnnnnnnnnnnnnnnnnnnnnnnnnnnnnnnnnnnnnnnnnnnnnnnnnnnnnnnnnnnnnnnnnnnnnnnnnnnnnnnnnnnnnnnnnnnnnnnnnnnnnnnnnnnnnnnnnnnnnnnnnnnnnnnnnnnnnnnnnnnnnnnnnnnnnnnnnnnnnnnnnnnnnnnnnnnnnnnnnnnnnnnnnnnnnnnnnnnnnnnnnnnnnnnnnnnnnnnnnnnnnnnnnnnnnnnnnnnnnnnnnnnnnnnnnnnnnnnnnnnnnnnnnnnnnnnnnnnnnnnnnnnnnnnnnnnnnnnnnnnnnnnnnnnnnnnnnnnnnnnnnnnnnnnnnnnnnnnnnnnnnnnnnnnnnnnnnnnnnnnnnnnnnnnnnnnnnnnnnnnnnnnnnnnnnnnnnnnnnnnnnnnnnnnnnnnnnnnnnnnnnnnnnnnnnnnnnnnnnnnnnnnnnnnnnnnnnnnnnnnnnnnnnnnnnnnnnnnnnnnnnnnnnnnnnnnnnnnnnnnnnnnnnnnnnnnnnnnnnnnnnnnnnnnnnnnnnnnnnnnnnnnnnnnnnnnnnnnnnnnnnnnnnnnnnnnnnnnnnnnnnnnnnnnnnnnnnnnnnnnnnnnnnnnnnnnnnnnnnnnnnnnnnnnnnnnnnnnnnnnnnnnnnnnnnnnnnnnnnnnnnnnnnnnnnnnnnnnnnnnnnnnnnnnnnnnnnnnnnnnnnnnnnnnnnnnnnnnnnnnnnnnnnnnnnnnnnnnnnnnnnnnnnnnnnnnnnnnnnnnnnnnnnnnnnnnnnnnnnnnnnnnnnnnnnnnnnnnnnnnnnnnnnnnnnnnnnnnnnnnnnnnnnnnnnnnnnnnnnnnnnnnnnnnnnnnnnnnnnnnnnnnnnnnnnnnnnnnnnnnnnnnnnnnnnnnnnnnnnnnnnnnnnnnnnnnnnnnnnnnnnnnnnnnnnnnnnnnnnnnnnnnnnnnnnnnnnnnnnnnnnnnnnnnnnnnnnnnnnnnnnnnnnnnnnnnnnnnnnnnnnnnnnnnnnnnnnnnnnnnnnnnnnnnnnnnnnnnnnnnnnnnnnnnnnnnnnnnnnnnnnnnnnnnnnnnnnnnnnnnnnnnnnnnnnnnnnnnnnnnnnnnnnnnnnnnnnnnnnnnnnnnnnnnnnnnnnnnnnnnnnnnnnnnnnnnnnnnnnnnnnnnnnnnnnnnnnnnnnnnnnnnnnnnnnnnnnnnnnnnnnnnnnnnnnnnnnnnnnnnnnnnnnnnnnnnnnnnnnnnnnnnnnnnnnnnnnnnnnnnnnnnnnnnnnnnnnnnnnnnnnnnnnnnnnnnnnnnnnnnnnnnnnnnnnnnnnnnnnnnnnnnnnnnnnnnnnnnnnnnnnnnnnnnnnnnnnnnnnnnnnnnnnnnnnnnnnnnnnnnnnnnnnnnnnnnnnnnnnnnnnnnnnnnnnnnnnnnnnnnnnnnnnnnnnnnnnnnnnnnnnnnnnnnnnnnnnnnnnnnnnnnnnnnnnnnnnnnnnnnnnnnnnnnnnnnnnnnnnnnnnnnnnnnnnnnnnnnnnnnnnnnnnnnnnnnnnnnnnnnnnnnnnnnnnnnnnnnnnnnnnnnnnnnnnnnnnnnnnnnnnnnnnnnnnnnnnnnnnnnnnnnnnnnnnnnnnnnnnnnnnnnnnnnnnnnnnnnnnnnnnnnnnnnnnnnnnnnnnnnnnnnnnnnnnnnnnnnnnnnnnnnnnnnnnnnnnnnnnnnnnnnnnnnnnnnnnnnnnnnnnnnnnnnnnnnnnnnnnnnnnnnnnnnnnnnnnnnnnnnnnnnnnnnnnnnnnnnnnnnnnnnnnnnnnnnnnnnnnnnnnnnnnnnnnnnnnnnnnnnnnnnnnnnnnnnnnnnnnnnnnnnnnnnnnnnnnnnnnnnnnnnnnnnnnnnnnnnnnnnnnnnnnnnnnnnnnnnnnnnnnnnnnnnnnnnnnnnnnnnnnnnnnnnnnnnnnnnnnnnnnnnnnnnnnnnnnnnnnnnnnnnnnnnnnnnnnnnnnnnnnnnnnnnnnnnnnnnnnnnnnnnnnnnnnnnnnnnnnnnnnnnnnnnnnnnnnnnnnnnnnnnnnnnnnnnnnnnnnnnnnnnnnnnnnnnnnnnnnnnnnnnnnnnnnnnnnnnnnnnnnnnnnnnnnnnnnnnnnnnnnnnnnnnnnnnnnnnnnnnnnnnnnnnnnnnnnnnnnnnnnnnnnnnnnnnnnnnnnnnnnnnnnnnnnnnnnnnnnnnnnnnnnnnnnnnnnnnnnnnnnnnnnnnnnnnnnnnnnnnnnnnnnnnnnnnnnnnnnnnnnnnnnnnnnnnnnnnnnnnnnnnnnnnnnnnnnnnnnnnnnnnnnnnnnnnnnnnnnnnnnnnnnnnnnnnnnnnnnnnnnnnnnnnnnnnnnnnnnnnnnnnnnnnnnnnnnnnnnnnnnnnnnnnnnnnnnnnnnnnnnnnnnnnnnnnnnnnnnnnnnnnnnnnnnnnnnnnnnnnnnnnnnnnnnnnnnnnnnnnnnnnnnnnnnnnnnnnnnnnnnnnnnnnnnnnnnnnnnnnnnnnnnnnnnnnnnnnnnnnnnnnnnnnnnnnnnnnnnnnnnnnnnnnnnnnnnnnnnnnnnnnnnnnnnnnnnnnnnnnnnnnnnnnnnnnnnnnnnnnnnnnnnnnnnnnnnnnnnnnnnnnnnnnnnnnnnnnnnnnnnnnnnnnnnnnnnnnnnnnnnnnnnnnnnnnnnnnnnnnnnnnnnnnnnnnnnnnnnnnnnnnnnnnnnnnnnnnnnnnnnnnnnnnnnnnnnnnnnnnnnnnnnnnnnnnnnnnnnnnnnnnnnnnnnnnnnnnnnnnnnnnnnnnnnnnnnnnnnnnnnnnnnnnnnnnnnnnnnnnnnnnnnnnnnnnnnnnnnnnnnnnnnnnnnnnnnnnnnnnnnnnnnnnnnnnnnnnnnnnnnnnnnnnnnnnnnnnnnnnnnnnnnnnnnnnnnnnnnnnnnnnnnnnnnnnnnnnnnnnnnnnnnnnnnnnnnnnnnnnnnnnnnnnnnnnnnnnnnnnnnnnnnnnnnnnnnnnnnnnnnnnnnnnnnnnnnnnnnnnnnnnnnnnnnnnnnnnnnnnnnnnnnnnnnnnnnnnnnnnnnnnnnnnnnnnnnnnnnnnnnnnnnnnnnnnnnnnnnnnnnnnnnnnnnnnnnnnnnnnnnnnnnnnnnnnnnnnnnnnnnnnnnnnnnnnnnnnnnnnnnnnnnnnnnnnnnnnnnnnnnnnnnnnnnnnnnnnnnnnnnnnnnnnnnnnnnnnnnnnnnnnnnnnnnnnnnnnnnnnnnnnnnnnnnnnnnnnnnnnnnnnnnnnnnnnnnnnnnnnnnnnnnnnnnnnnnnnnnnnnnnnnnnnnnnnnnnnnnnnnnnnnnnnnnnnnnnnnnnnnnnnnnnnnnnnnnnnnnnnnnnnnnnnnnnnnnnnnnnnnnnnnnnnnnnnnnnnnnnnnnnnnnnnnnnnnnnnnnnnnnnnnnnnnnnnnnnnnnnnnnnnnnnnnnnnnnnnnnnnnnnnnnnnnnnnnnnnnnnnnnnnnnnnnnnnnnnnnnnnnnnnnnnnnnnnnnnnnnnnnnnnnnnnnnnnnnnnnnnnnnnnnnnnnnnnnnnnnnnnnnnnnnnnnnnnnnnnnnnnnnnnnnnnnnnnnnnnnnnnnnnnnnnnnnnnnnnnnnnnnnnnnnnnnnnnnnnnnnnnnnnnnnnnnnnnnnnnnnnnnnnnnnnnnnnnnnnnnnnnnnnnnnnnnnnnnnnnnnnnnnnnnnnnnnnnnnnnnnnnnnnnnnnnnnnnnnnnnnnnnnnnnnnnnnnnnnnnnnnnnnnnnnnnnnnnnnnnnnnnnnnnnnnnnnnnnnnnnnnnnnnnnnnnnnnnnnnnnnnnnnnnnnnnnnnnnnnnnnnnnnnnnnnnnnnnnnnnnnnnnnnnnnnnnnnnnnnnnnnnnnnnnnnnnnnnnnnnnnnnnnnnnnnnnnnnnnnnnnnnnnnnnnnnnnnnnnnnnnnnnnnnnnnnnnnnnnnnnnnnnnnnnnnnnnnnnnnnnnnnnnnnnnnnnnnnnnnnnnnnnnnnnnnnnnnnnnnnnnnnnnnnnnnnnnnnnnnnnnnnnnnnnnnnnnnnnnnnnnnnnnnnnnnnnnnnnnnnnnnnnnnnnnnnnnnnnnnnnnnnnnnnnnnnnnnnnnnnnnnnnnnnnnnnnnnnnnnnnnnnnnnnnnnnnnnnnnnnnnnnnnnnnnnnnnnnnnnnnnnnnnnnnnnnnnnnnnnnnnnnnnnnnnnnnnnnnnnnnnnnnnnnnnnnnnnnnnnnnnnnnnnnnnnnnnnnnnnnnnnnnnnnnnnnnnnnnnnnnnnnnnnnnnnnnnnnnnnnnnnnnnnnnnnnnnnnnnnnnnnnnnnnnnnnnnnnnnnnnnnnnnnnnnnnnnnnnnnnnnnnnnnnnnnnnnnnnnnnnnnnnnnnnnnnnnnnnnnnnnnnnnnnnnnnnnnnnnnnnnnnnnnnnnnnnnnnnnnnnnnnnnnnnnnnnnnnnnnnnnnnnnnnnnnnnnnnnnnnnnnnnnnnnnnnnnnnnnnnnnnnnnnnnnnnnnnnnnnnnnnnnnnnnnnnnnnnnnnnnnnnnnnnnnnnnnnnnnnnnnnnnnnnnnnnnnnnnnnnnnnnnnnnnnnnnnnnnnnnnnnnnnnnnnnnnnnnnnnnnnnnnnnnnnnnnnnnnnnnnnnnnnnnnnnnnnnnnnnnnnnnnnnnnnnnnnnnnnnnnnnnnnnnnnnnnnnnnnnnnnnnnnnnnnnnnnnnnnnnnnnnnnnnnnnnnnnnnnnnnnnnnnnnnnnnnnnnnnnnnnnnnnnnnnnnnnnnnnnnnnnnnnnnnnnnnnnnnnnnnnnnnnnnnnnnnnnnnnnnnnnnnnnnnnnnnnnnnnnnnnnnnnnnnnnnnnnnnnnnnnnnnnnnnnnnnnnnnnnnnnnnnnnnnnnnnnnnnnnnnnnnnnnnnnnnnnnnnnnnnnnnnnnnnnnnnnnnnnnnnnnnnnnnnnnnnnnnnnnnnnnnnnnnnnnnnnnnnnnnnnnnnnnnnnnnnnnnnnnnnnnnnnnnnnnnnnnnnnnnnnnnnnnnnnnnnnnnnnnnnnnnnnnnnnnnnnnnnnnnnnnnnnnnnnnnnnnnnnnnnnnnnnnnnnnnnnnnnnnnnnnnnnnnnnnnnnnnnnnnnnnnnnnnnnnnnnnnnnnnnnnnnnnnnnnnnnnnnnnnnnnnnnnnnnnnnnnnnnnnnnnnnnnnnnnnnnnnnnnnnnnnnnnnnnnnnnnnnnnnnnnnnnnnnnnnnnnnnnnnnnnnnnnnnnnnnnnnnnnnnnnnnnnnnnnnnnnnnnnnnnnnnnnnnnnnnnnnnnnnnnnnnnnnnnnnnnnnnnnnnnnnnnnnnnnnnnnnnnnnnnnnnnnnnnnnnnnnnnnnnnnnnnnnnnnnnnnnnnnnnnnnnnnnnnnnnnnnnnnnnnnnnnnnnnnnnnnnnnnnnnnnnnnnnnnnnnnnnnnnnnnnnnnnnnnnnnnnnnnnnnnnnnnnnnnnnnnnnnnnnnnnnnnnnnnnnnnnnnnnnnnnnnnnnnnnnnnnnnnnnnnnnnnnnnnnnnnnnnnnnnnnnnnnnnnnnnnnnnnnnnnnnnnnnnnnnnnnnnnnnnnnnnnnnnnnnnnnnnnnnnnnnnnnnnnnnnnnnnnnnnnnnnnnnnnnnnnnnnnnnnnnnnnnnnnnnnnnnnnnnnnnnnnnnnnnnnnnnnnnnnnnnnnnnnnnnnnnnnnnnnnnnnnnnnnnnnnnnnnnnnnnnnnnnnnnnnnnnnnnnnnnnnnnnnnnnnnnnnnnnnnnnnnnnnnnnnnnnnnnnnnnnnnnnnnnnnnnnnnnnnnnnnnnnnnnnnnnnnnnnnnnnnnnnnnnnnnnnnnnnnnnnnnnnnnnnnnnnnnnnnnnnnnnnnnnnnnnnnnnnnnnnnnnnnnnnnnnnnnnnnnnnnnnnnnnnnnnnnnnnnnnnnnnnnnnnnnnnnnnnnnnnnnnnnnnnnnnnnnnnnnnnnnnnnnnnnnnnnnnnnnnnnnnnnnnnnnnnnnnnnnnnnnnnnnnnnnnnnnnnnnnnnnnnnnnnnnnnnnnnnnnnnnnnnnnnnnnnnnnnnnnnnnnnnnnnnnnnnnnnnnnnnnnnnnnnnnnnnnnnnnnnnnnnnnnnnnnnnnnnnnnnnnnnnnnnnnnnnnnnnnnnnnnnnnnnnnnnnnnnnnnnnnnnnnnnnnnnnnnnnnnnnnnnnnnnnnnnnnnnnnnnnnnnnnnnnnnnnnnnnnnnnnnnnnnnnnnnnnnnnnnnnnnnnnnnnnnnnnnnnnnnnnnnnnnnnnnnnnnnnnnnnnnnnnnnnnnnnnnnnnnnnnnnnnnnnnnnnnnnnnnnnnnnnnnnnnnnnnnnnnnnnnnnnnnnnnnnnnnnnnnnnnnnnnnnnnnnnnnnnnnnnnnnnnnnnnnnnnnnnnnnnnnnnnnnnnnnnnnnnnnnnnnnnnnnnnnnnnnnnnnnnnnnnnnnnnnnnnnnnnnnnnnnnnnnnnnnnnnnnnnnnnnnnnnnnnnnnnnnnnnnnnnnnnnnnnnnnnnnnnnnnnnnnnnnnnnnnnnnnnnnnnnnnnnnnnnnnnnnnnnnnnnnnnnnnnnnnnnnnnnnnnnnnnnnnnnnnnnnnnnnnnnnnnnnnnnnnnnnnnnnnnnnnnnnnnnnnnnnnnnnnnnnnnnnnnnnnnnnnnnnnnnnnnnnnnnnnnnnnnnnnnnnnnnnnnnnnnnnnnnnnnnnnnnnnnnnnnnnnnnnnnnnnnnnnnnnnnnnnnnnnnnnnnnnnnnnnnnnnnnnnnnnnnnnnnnnnnnnnnnnnnnnnnnnnnnnnnnnnnnnnnnnnnnnnnnnnnnnnnnnnnnnnnnnnnnnnnnnnnnnnnnnnnnnnnnnnnnnnnnnnnnnnnnnnnnnnnnnnnnnnnnnnnnnnnnnnnnnnnnnnnnnnnnnnnnnnnnnnnnnnnnnnnnnnnnnnnnnnnnnnnnnnnnnnnnnnnnnnnnnnnnnnnnnnnnnnnnnnnnnnnnnnnnnnnnnnnnnnnnnnnnnnnnnnnnnnnnnnnnnnnnnnnnnnnnnnnnnnnnnnnnnnnnnnnnnnnnnnnnnnnnnnnnnnnnnnnnnnnnnnnnnnnnnnnnnnnnnnnnnnnnnnnnnnnnnnnnnnnnnnnnnnnnnnnnnnnnnnnnnnnnnnnnnnnnnnnnnnnnnnnnnnnnnnnnnnnnnnnnnnnnnnnnnnnnnnnnnnnnnnnnnnnnnnnnnnnnnnnnnnnnnnnnnnnnnnnnnnnnnnnnnnnnnnnnnnnnnnnnnnnnnnnnnnnnnnnnnnnnnnnnnnnnnnnnnnnnnnnnnnnnnnnnnnnnnnnnnnnnnnnnnnnnnnnnnnnnnnnnnnnnnnnnnnnnnnnnnnnnnnnnnnnnnnnnnnnnnnnnnnnnnnnnnnnnnnnnnnnnnnnnnnnnnnnnnnnnnnnnnnnnnnnnnnnnnnnnnnnnnnnnnnnnnnnnnnnnnnnnnnnnnnnnnnnnnnnnnnnnnnnnnnnnnnnnnnnnnnnnnnnnnnnnnnnnnnnnnnnnnnnnnnnnnnnnnnnnnnnnnnnnnnnnnnnnnnnnnnnnnnnnnnnnnnnnnnnnnnnnnnnnnnnnnnnnnnnnnnnnnnnnnnnnnnnnnnnnnnnnnnnnnnnnnnnnnnnnnnnnnnnnnnnnnnnnnnnnnnnnnnnnnnnnnnnnnnnnnnnnnnnnnnnnnnnnnnnnnnnnnnnnnnnnnnnnnnnnnnnnnnnnnnnnnnnnnnnnnnnnnnnnnnnnnnnnnnnnnnnnnnnnnnnnnnnnnnnnnnnnnnnnnnnnnnnnnnnnnnnnnnnnnnnnnnnnnnnnnnnnnnnnnnnnnnnnnnnnnnnnnnnnnnnnnnnnnnnnnnnnnnnnnnnnnnnnnnnnnnnnnnnnnnnnnnnnnnnnnnnnnnnnnnnnnnnnnnnnnnnnnnnnnnnnnnnnnnnnnnnnnnnnnnnnnnnnnnnnnnnnnnnnnnnnnnnnnnnnnnnnnnnnnnnnnnnnnnnnnnnnnnnnnnnnnnnnnnnnnnnnnnnnnnnnnnnnnnnnnnnnnnnnnnnnnnnnnnnnnnnnnnnnnnnnnnnnnnnnnnnnnnnnnnnnnnnnnnnnnnnnnnnnnnnnnnnnnnnnnnnnnnnnnnnnnnnnnnnnnnnnnnnnnnnnnnnnnnnnnnnnnnnnnnnnnnnnnnnnnnnnnnnnnnnnnnnnnnnnnnnnnnnnnnnnnnnnnnnnnnnnnnnnnnnnnnnnnnnnnnnnnnnnnnnnnnnnnnnnnnnnnnnnnnnnnnnnnnnnnnnnnnnnnnnnnnnnnnnnnnnnnnnnnnnnnnnnnnnnnnnnnnnnnnnnnnnnnnnnnnnnnnnnnnnnnnnnnnnnnnnnnnnnnnnnnnnnnnnnnnnnnnnnnnnnnnnnnnnnnnnnnnnnnnnnnnnnnnnnnnnnnnnnnnnnnnnnnnnnnnnnnnnnnnnnnnnnnnnnnnnnnnnnnnnnnnnnnnnnnnnnnnnnnnnnnnnnnnnnnnnnnnnnnnnnnnnnnnnnnnnnnnnnnnnnnnnnnnnnnnnnnnnnnnnnnnnnnnnnnnnnnnnnnnnnnnnnnnnnnnnnnnnnnnnnnnnnnnnnnnnnnnnnnnnnnnnnnnnnnnnnnnnnnnnnnnnnnnnnnnnnnnnnnnnnnnnnnnnnnnnnnnnnnnnnnnnnnnnnnnnnnnnnnnnnnnnnnnnnnnnnnnnnnnnnnnnnnnnnnnnnnnnnnnnnnnnnnnnnnnnnnnnnnnnnnnnnnnnnnnnnnnnnnnnnnnnnnnnnnnnnnnnnnnnnnnnnnnnnnnnnnnnnnnnnnnnnnnnnnnnnnnnnnnnnnnnnnnnnnnnnnnnnnnnnnnnnnnnnnnnnnnnnnnnnnnnnnnnnnnnnnnnnnnnnnnnnnnnnnnnnnnnnnnnnnnnnnnnnnnnnnnnnnnnnnnnnnnnnnnnnnnnnnnnnnnnnnnnnnnnnnnnnnnnnnnnnnnnnnnnnnnnnnnnnnnnnnnnnnnnnnnnnnnnnnnnnnnnnnnnnnnnnnnnnnnnnnnnnnnnnnnnnnnnnnnnnnnnnnnnnnnnnnnnnnnnnnnnnnnnnnnnnnnnnnnnnnnnnnnnnnnnnnnnnnnnnnnnnnnnnnnnnnnnnnnnnnnnnnnnnnnnnnnnnnnnnnnnnnnnnnnnnnnnnnnnnnnnnnnnnnnnnnnnnnnnnnnnnnnnnnnnnnnnnnnnnnnnnnnnnnnnnnnnnnnnnnnnnnnnnnnnnnnnnnnnnnnnnnnnnnnnnnnnnnnnnnnnnnnnnnnnnnnnnnnnnnnnnnnnnnnnnnnnnnnnnnnnnnnnnnnnnnnnnnnnnnnnnnnnnnnnnnnnnnnnnnnnnnnnnnnnnnnnnnnnnnnnnnnnnnnnnnnnnnnnnnnnnnnnnnnnnnnnnnnnnnnnnnnnnnnnnnnnnnnnnnnnnnnnnnnnnnnnnnnnnnnnnnnnnnnnnnnnnnnnnnnnnnnnnnnnnnnnnnnnnnnnnnnnnnnnnnnnnnnnnnnnnnnnnnnnnnnnnnnnnnnnnnnnnnnnnnnnnnnnnnnnnnnnnnnnnnnnnnnnnnnnnnnnnnnnnnnnnnnnnnnnnnnnnnnnnnnnnnnnnnnnnnnnnnnnnnnnnnnnnnnnnnnnnnnnnnnnnnnnnnnnnnnnnnnnnnnnnnnnnnnnnnnnnnnnnnnnnnnnnnnnnnnnnnnnnnnnnnnnnnnnnnnnnnnnnnnnnnnnnnnnnnnnnnnnnnnnnnnnnnnnnnnnnnnnnnnnnnnnnnnnnnnnnnnnnnnnnnnnnnnnnnnnnnnnnnnnnnnnnnnnnnnnnnnnnnnnnnnnnnnnnnnnnnnnnnnnnnnnnnnnnnnnnnnnnnnnnnnnnnnnnnnnnnnnnnnnnnnnnnnnnnnnnnnnnnnnnnnnnnnnnnnnnnnnnnnnnnnnnnnnnnnnnnnnnnnnnnnnnnnnnnnnnnnnnnnnnnnnnnnnnnnnnnnnnnnnnnnnnnnnnnnnnnnnnnnnnnnnnnnnnnnnnnnnnnnnnnnnnnnnnnnnnnnnnnnnnnnnnnnnnnnnnnnnnnnnnnnnnnnnnnnnnnnnnnnnnnnnnnnnnnnnnnnnnnnnnnnnnnnnnnnnnnnnnnnnnnnnnnnnnnnnnnnnnnnnnnnnnnnnnnnnnnnnnnnnnnnnnnnnnnnnnnnnnnnnnnnnnnnnnnnnnnnnnnnnnnnnnnnnnnnnnnnnnnnnnnnnnnnnnnnnnnnnnnnnnnnnnnnnnnnnnnnnnnnnnnnnnnnnnnnnnnnnnnnnnnnnnnnnnnnnnnnnnnnnnnnnnnnnnnnnnnnnnnnnnnnnnnnnnnnnnnnnnnnnnnnnnnnnnnnnnnnnnnnnnnnnnnnnnnnnnnnnnnnnnnnnnnnnnnnnnnnnnnnnnnnnnnnnnnnnnnnnnnnnnnnnnnnnnnnnnnnnnnnnnnnnnnnnnnnnnnnnnnnnnnnnnnnnnnnnnnnnnnnnnnnnnnnnnnnnnnnnnnnnnnnnnnnnnnnnnnnnnnnnnnnnnnnnnnnnnnnnnnnnnnnnnnnnnnnnnnnnnnnnnnnnnnnnnnnnnnnnnnnnnnnnnnnnnnnnnnnnnnnnnnnnnnnnnnnnnnnnnnnnnnnnnnnnnnnnnnnnnnnnnnnnnnnnnnnnnnnnnnnnnnnnnnnnnnnnnnnnnnnnnnnnnnnnnnnnnnnnnnnnnnnnnnnnnnnnnnnnnnnnnnnnnnnnnnnnnnnnnnnnnnnnnnnnnnnnnnnnnnnnnnnnnnnnnnnnnnnnnnnnnnnnnnnnnnnnnnnnnnnnnnnnnnnnnnnnnnnnnnnnnnnnnnnnnnnnnnnnnnnnnnnnnnnnnnnnnnnnnnnnnnnnnnnnnnnnnnnnnnnnnnnnnnnnnnnnnnnnnnnnnnnnnnnnnnnnnnnnnnnnnnnnnnnnnnnnnnnnnnnnnnnnnnnnnnnnnnnnnnnnnnnnnnnnnnnnnnnnnnnnnnnnnnnnnnnnnnnnnnnnnnnnnnnnnnnnnnnnnnnnnnnnnnnnnnnnnnnnnnnnnnnnnnnnnnnnnnnnnnnnnnnnnnnnnnnnnnnnnnnnnnnnnnnnnnnnnnnnnnnnnnnnnnnnnnnnnnnnnnnnnnnnnnnnnnnnnnnnnnnnnnnnnnnnnnnnnnnnnnnnnnnnnnnnnnnnnnnnnnnnnnnnnnnnnnnnnnnnnnnnnnnnnnnnnnnnnnnnnnnnnnnnnnnnnnnnnnnnnnnnnnnnnnnnnnnnnnnnnnnnnnnnnnnnnnnnnnnnnnnnnnnnnnnnnnnnnnnnnnnnnnnnnnnnnnnnnnnnnnnnnnnnnnnnnnnnnnnnnnnnnnnnnnnnnnnnnnnnnnnnnnnnnnnnnnnnnnnnnnnnnnnnnnnnnnnnnnnnnnnnnnnnnnnnnnnnnnnnnnnnnnnnnnnnnnnnnnnnnnnnnnnnnnnnnnnnnnnnnnnnnnnnnnnnnnnnnnnnnnnnnnnnnnnnnnnnnnnnnnnnnnnnnnnnnnnnnnnnnnnnnnnnnnnnnnnnnnnnnnnnnnnnnnnnnnnnnnnnnnnnnnnnnnnnnnnnnnnnnnnnnnnnnnnnnnnnnnnnnnnnnnnnnnnnnnnnnnnnnnnnnnnnnnnnnnnnnnnnnnnnnnnnnnnnnnnnnnnnnnnnnnnnnnnnnnnnnnnnnnnnnnnnnnnnnnnnnnnnnnnnnnnnnnnnnnnnnnnnnnnnnnnnnnnnnnnnnnnnnnnnnnnnnnnnnnnnnnnnnnnnnnnnnnnnnnnnnnnnnnnnnnnnnnnnnnnnnnnnnnnnnnnnnnnnnnnnnnnnnnnnnnnnnnnnnnnnnnnnnnnnnnnnnnnnnnnnnnnnnnnnnnnnnnnnnnnnnnnnnnnnnnnnnnnnnnnnnnnnnnnnnnnnnnnnnnnnnnnnnnnnnnnnnnnnnnnnnnnnnnnnnnnnnnnnnnnnnnnnnnnnnnnnnnnnnnnnnnnnnnnnnnnnnnnnnnnnnnnnnnnnnnnnnnnnnnnnnnnnnnnnnnnnnnnnnnnnnnnnnnnnnnnnnnnnnnnnnnnnnnnnnnnnnnnnnnnnnnnnnnnnnnnnnnnnnnnnnnnnnnnnnnnnnnnnnnnnnnnnnnnnnnnnnnnnnnnnnnnnnnnnnnnnnnnnnnnnnnnnnnnnnnnnnnnnnnnnnnnnnnnnnnnnnnnnnnnnnnnnnnnnnnnnnnnnnnnnnnnnnnnnnnnnnnnnnnnnnnnnnnnnnnnnnnnnnnnnnnnnnnnnnnnnnnnnnnnnnnnnnnnnnnnnnnnnnnnnnnnnnnnnnnnnnnnnnnnnnnnnnnnnnnnnnnnnnnnnnnnnnnnnnnnnnnnnnnnnnnnnnnnnnnnnnnnnnnnnnnnnnnnnnnnnnnnnnnnnnnnnnnnnnnnnnnnnnnnnnnnnnnnnnnnnnnnnnnnnnnnnnnnnnnnnnnnnnnnnnnnnnnnnnnnnnnnnnnnnnnnnnnnnnnnnnnnnnnnnnnnnnnnnnnnnnnnnnnnnnnnnnnnnnnnnnnnnnnnnnnnnnnnnnnnnnnnnnnnnnnnnnnnnnnnnnnnnnnnnnnnnnnnnnnnnnnnnnnnnnnnnnnnnnnnnnnnnnnnnnnnnnnnnnnnnnnnnnnnnnnnnnnnnnnnnnnnnnnnnnnnnnnnnnnnnnnnnnnnnnnnnnnnnnnnnnnnnnnnnnnnnnnnnnnnnnnnnnnnnnnnnnnnnnnnnnnnnnnnnnnnnnnnnnnnnnnnnnnnnnnnnnnnnnnnnnnnnnnnnnnnnnnnnnnnnnnnnnnnnnnnnnnnnnnnnnnnnnnnnnnnnnnnnnnnnnnnnnnnnnnnnnnnnnnnnnnnnnnnnnnnnnnnnnnnnnnnnnnnnnnnnnnnnnnnnnnnnnnnnnnnnnnnnnnnnnnnnnnnnnnnnnnnnnnnnnnnnnnnnnnnnnnnnnnnnnnnnnnnnnnnnnnnnnnnnnnnnnnnnnnnnnnnnnnnnnnnnnnnnnnnnnnnnnnnnnnnnnnnnnnnnnnnnnnnnnnnnnnnnnnnnnnnnnnnnnnnnnnnnnnnnnnnnnnnnnnnnnnnnnnnnnnnnnnnnnnnnnnnnnnnnnnnnnnnnnnnnnnnnnnnnnnnnnnnnnnnnnnnnnnnnnnnnnnnnnnnnnnnnnnnnnnnnnnnnnnnnnnnnnnnnnnnnnnnnnnnnnnnnnnnnnnnnnnnnnnnnnnnnnnnnnnnnnnnnnnnnnnnnnnnnnnnnnnnnnnnnnnnnnnnnnnnnnnnnnnnnnnnnnnnnnnnnnnnnnnnnnnnnnnnnnnnnnnnnnnnnnnnnnnnnnnnnnnnnnnnnnnnnnnnnnnnnnnnnnnnnnnnnnnnnnnnnnnnnnnnnnnnnnnnnnnnnnnnnnnnnnnnnnnnnnnnnnnnnnnnnnnnnnnnnnnnnnnnnnnnnnnnnnnnnnnnnnnnnnnnnnnnnnnnnnnnnnnnnnnnnnnnnnnnnnnnnnnnnnnnnnnnnnnnnnnnnnnnnnnnnnnnnnnnnnnnnnnnnnnnnnnnnnnnnnnnnnnnnnnnnnnnnnnnnnnnnnnnnnnnnnnnnnnnnnnnnnnnnnnnnnnnnnnnnnnnnnnnnnnnnnnnnnnnnnnnnnnnnnnnnnnnnnnnnnnnnnnnnnnnnnnnnnnnnnnnnnnnnnnnnnnnnnnnnnnnnnnnnnnnnnnnnnnnnnnnnnnnnnnnnnnnnnnnnnnnnnnnnnnnnnnnnnnnnnnnnnnnnnnnnnnnnnnnnnnnnnnnnnnnnnnnnnnnnnnnnnnnnnnnnnnnnnnnnnnnnnnnnnnnnnnnnnnnnnnnnnnnnnnnnnnnnnnnnnnnnnnnnnnnnnnnnnnnnnnnnnnnnnnnnnnnnnnnnnnnnnnnnnnnnnnnnnnnnnnnnnnnnnnnnnnnnnnnnnnnnnnnnnnnnnnnnnnnnnnnnnnnnnnnnnnnnnnnnnnnnnnnnnnnnnnnnnnnnnnnnnnnnnnnnnnnnnnnnnnnnnnnnnnnnnnnnnnnnnnnnnnnnnnnnnnnnnnnnnnnnnnnnnnnnnnnnnnnnnnnnnnnnnnnnnnnnnnnnnnnnnnnnnnnnnnnnnnnnnnnnnnnnnnnnnnnnnnnnnnnnnnnnnnnnnnnnnnnnnnnnnnnnnnnnnnnnnnnnnnnnnnnnnnnnnnnnnnnnnnnnnnnnnnnnnnnnnnnnnnnnnnnnnnnnnnnnnnnnnnnnnnnnnnnnnnnnnnnnnnnnnnnnnnnnnnnnnnnnnnnnnnnnnnnnnnnnnnnnnnnnnnnnnnnnnnnnnnnnnnnnnnnnnnnnnnnnnnnnnnnnnnnnnnnnnnnnnnnnnnnnnnnnnnnnnnnnnnnnnnnnnnnnnnnnnnnnnnnnnnnnnnnnnnnnnnnnnnnnnnnnnnnnnnnnnnnnnnnnnnnnnnnnnnnnnnnnnnnnnnnnnnnnnnnnnnnnnnnnnnnnnnnnnnnnnnnnnnnnnnnnnnnnnnnnnnnnnnnnnnnnnnnnnnnnnnnnnnnnnnnnnnnnnnnnnnnnnnnnnnnnnnnnnnnnnnnnnnnnnnnnnnnnnnnnnnnnnnnnnnnnnnnnnnnnnnnnnnnnnnnnnnnnnnnnnnnnnnnnnnnnnnnnnnnnnnnnnnnnnnnnnnnnnnnnnnnnnnnnnnnnnnnnnnnnnnnnnnnnnnnnnnnnnnnnnnnnnnnnnnnnnnnnnnnnnnnnnnnnnnnnnnnnnnnnnnnnnnnnnnnnnnnnnnnnnnnnnnnnnnnnnnnnnnnnnnnnnnnnnnnnnnnnnnnnnnnnnnnnnnnnnnnnnnnnnnnnnnnnnnnnnnnnnnnnnnnnnnnnnnnnnnnnnnnnnnnnnnnnnnnnnnnnnnnnnnnnnnnnnnnnnnnnnnnnnnnnnnnnnnnnnnnnnnnnnnnnnnnnnnnnnnnnnnnnnnnnnnnnnnnnnnnnnnnnnnnnnnnnnnnnnnnnnnnnnnnnnnnnnnnnnnnnnnnnnnnnnnnnnnnnnnnnnnnnnnnnnnnnnnnnnnnnnnnnnnnnnnnnnnnnnnnnnnnnnnnnnnnnnnnnnnnnnnnnnnnnnnnnnnnnnnnnnnnnnnnnnnnnnnnnnnnnnnnnnnnnnnnnnnnnnnnnnnnnnnnnnnnnnnnnnnnnnnnnnnnnnnnnnnnnnnnnnnnnnnnnnnnnnnnnnnnnnnnnnnnnnnnnnnnnnnnnnnnnnnnnnnnnnnnnnnnnnnnnnnnnnnnnnnnnnnnnnnnnnnnnnnnnnnnnnnnnnnnnnnnnnnnnnnnnnnnnnnnnnnnnnnnnnnnnnnnnnnnnnnnnnnnnnnnnnnnnnnnnnnnnnnnnnnnnnnnnnnnnnnnnnnnnnnnnnnnnnnnnnnnnnnnnnnnnnnnnnnnnnnnnnnnnnnnnnnnnnnnnnnnnnnnnnnnnnnnnnnnnnnnnnnnnnnnnnnnnnnnnnnnnnnnnnnnnnnnnnnnnnnnnnnnnnnnnnnnnnnnnnnnnnnnnnnnnnnnnnnnnnnnnnnnnnnnnnnnnnnnnnnnnnnnnnnnnnnnnnnnnnnnnnnnnnnnnnnnnnnnnnnnnnnnnnnnnnnnnnnnnnnnnnnnnnnnnnnnnnnnnnnnnnnnnnnnnnnnnnnnnnnnnnnnnnnnnnnnnnnnnnnnnnnnnnnnnnnnnnnnnnnnnnnnnnnnnnnnnnnnnnnnnnnnnnnnnnnnnnnnnnnnnnnnnnnnnnnnnnnnnnnnnnnnnnnnnnnnnnnnnnnnnnnnnnnnnnnnnnnnnnnnnnnnnnnnnnnnnnnnnnnnnnnnnnnnnnnnnnnnnnnnnnnnnnnnnnnnnnnnnnnnnnnnnnnnnnnnnnnnnnnnnnnnnnnnnnnnnnnnnnnnnnnnnnnnnnnnnnnnnnnnnnnnnnnnnnnnnnnnnnnnnnnnnnnnnnnnnnnnnnnnnnnnnnnnnnnnnnnnnnnnnnnnnnnnnnnnnnnnnnnnnnnnnnnnnnnnnnnnnnnnnnnnnnnnnnnnnnnnnnnnnnnnnnnnnnnnnnnnnnnnnnnnnnnnnnnnnnnnnnnnnnnnnnnnnnnnnnnnnnnnnnnnnnnnnnnnnnnnnnnnnnnnnnnnnnnnnnnnnnnnnnnnnnnnnnnnnnnnnnnnnnnnnnnnnnnnnnnnnnnnnnnnnnnnnnnnnnnnnnnnnnnnnnnnnnnnnnnnnnnnnnnnnnnnnnnnnnnnnnnnnnnnnnnnnnnnnnnnnnnnnnnnnnnnnnnnnnnnnnnnnnnnnnnnnnnnnnnnnnnnnnnnnnnnnnnnnnnnnnnnnnnnnnnnnnnnnnnnnnnnnnnnnnnnnnnnnnnnnnnnnnnnnnnnnnnnnnnnnnnnnnnnnnnnnnnnnnnnnnnnnnnnnnnnnnnnnnnnnnnnnnnnnnnnnnnnnnnnnnnnnnnnnnnnnnnnnnnnnnnnnnnnnnnnnnnnnnnnnnnnnnnnnnnnnnnnnnnnnnnnnnnnnnnnnnnnnnnnnnnnnnnnnnnnnnnnnnnnnnnnnnnnnnnnnnnnnnnnnnnnnnnnnnnnnnnnnnnnnnnnnnnnnnnnnnnnnnnnnnnnnnnnnnnnnnnnnnnnnnnnnnnnnnnnnnnnnnnnnnnnnnnnnnnnnnnnnnnnnnnnnnnnnnnnnnnnnnnnnnnnnnnnnnnnnnnnnnnnnnnnnnnnnnnnnnnnnnnnnnnnnnnnnnnnnnnnnnnnnnnnnnnnnnnnnnnnnnnnnnnnnnnnnnnnnnnnnnnnnnnnnnnnnnnnnnnnnnnnnnnnnnnnnnnnnnnnnnnnnnnnnnnnnnnnnnnnnnnnnnnnnnnnnnnnnnnnnnnnnnnnnnnnnnnnnnnnnnnnnnnnnnnnnnnnnnnnnnnnnnnnnnnnnnnnnnnnnnnnnnnnnnnnnnnnnnnnnnnnnnnnnnnnnnnnnnnnnnnnnnnnnnnnnnnnnnnnnnnnnnnnnnnnnnnnnnnnnnnnnnnnnnnnnnnnnnnnnnnnnnnnnnnnnnnnnnnnnnnnnnnnnnnnnnnnnnnnnnnnnnnnnnnnnnnnnnnnnnnnnnnnnnnnnnnnnnnnnnnnnnnnnnnnnnnnnnnnnnnnnnnnnnnnnnnnnnnnnnnnnnnnnnnnnnnnnnnnnnnnnnnnnnnnnnnnnnnnnnnnnnnnnnnnnnnnnnnnnnnnnnnnnnnnnnnnnnnnnnnnnnnnnnnnnnnnnnnnnnnnnnnnnnnnnnnnnnnnnnnnnnnnnnnnnnnnnnnnnnnnnnnnnnnnnnnnnnnnnnnnnnnnnnnnnnnnnnnnnnnnnnnnnnnnnnnnnnnnnnnnnnnnnnnnnnnnnnnnnnnnnnnnnnnnnnnnnnnnnnnnnnnnnnnnnnnnnnnnnnnnnnnnnnnnnnnnnnnnnnnnnnnnnnnnnnnnnnnnnnnnnnnnnnnnnnnnnnnnnnnnnnnnnnnnnnnnnnnnnnnnnnnnnnnnnnnnnnnnnnnnnnnnnnnnnnnnnnnnnnnnnnnnnnnnnnnnnnnnnnnnnnnnnnnnnnnnnnnnnnnnnnnnnnnnnnnnnnnnnnnnnnnnnnnnnnnnnnnnnnnnnnnnnnnnnnnnnnnnnnnnnnnnnnnnnnnnnnnnnnnnnnnnnnnnnnnnnnnnnnnnnnnnnnnnnnnnnnnnnnnnnnnnnnnnnnnnnnnnnnnnnnnnnnnnnnnnnnnnnnnnnnnnnnnnnnnnnnnnnnnnnnnnnnnnnnnnnnnnnnnnnnnnnnnnnnnnnnnnnnnnnnnnnnnnnnnnnnnnnnnnnnnnnnnnnnnnnnnnnnnnnnnnnnnnnnnnnnnnnnnnnnnnnnnnnnnnnnnnnnnnnnnnnnnnnnnnnnnnnnnnnnnnnnnnnnnnnnnnnnnnnnnnnnnnnnnnnnnnnnnnnnnnnnnnnnnnnnnnnnnnnnnnnnnnnnnnnnnnnnnnnnnnnnnnnnnnnnnnnnnnnnnnnnnnnnnnnnnnnnnnnnnnnnnnnnnnnnnnnnnnnnnnnnnnnnnnnnnnnnnnnnnnnnnnnnnnnnnnnnnnnnnnnnnnnnnnnnnnnnnnnnnnnnnnnnnnnnnnnnnnnnnnnnnnnnnnnnnnnnnnnnnnnnnnnnnnnnnnnnnnnnnnnnnnnnnnnnnnnnnnnnnnnnnnnnnnnnnnnnnnnnnnnnnnnnnnnnnnnnnnnnnnnnnnnnnnnnnnnnnnnnnnnnnnnnnnnnnnnnnnnnnnnnnnnnnnnnnnnnnnnnnnnnnnnnnnnnnnnnnnnnnnnnnnnnnnnnnnnnnnnnnnnnnnnnnnnnnnnnnnnnnnnnnnnnnnnnnnnnnnnnnnnnnnnnnnnnnnnnnnnnnnnnnnnnnnnnnnnnnnnnnnnnnnnnnnnnnnnnnnnnnnnnnnnnnnnnnnnnnnnnnnnnnnnnnnnnnnnnnnnnnnnnnnnnnnnnnnnnnnnnnnnnnnnnnnnnnnnnnnnnnnnnnnnnnnnnnnnnnnnnnnnnnnnnnnnnnnnnnnnnnnnnnnnnnnnnnnnnnnnnnnnnnnnnnnnnnnnnnnnnnnnnnnnnnnnnnnnnnnnnnnnnnnnnnnnnnnnnnnnnnnnnnnnnnnnnnnnnnnnnnnnnnnnnnnnnnnnnnnnnnnnnnnnnnnnnnnnnnnnnnnnnnnnnnnnnnnnnnnnnnnnnnnnnnnnnnnnnnnnnnnnnnnnnnnnnnnnnnnnnnnnnnnnnnnnnnnnnnnnnnnnnnnnnnnnnnnnnnnnnnnnnnnnnnnnnnnnnnnnnnnnnnnnnnnnnnnnnnnnnnnnnnnnnnnnnnnnnnnnnnnnnnnnnnnnnnnnnnnnnnnnnnnnnnnnnnnnnnnnnnnnnnnnnnnnnnnnnnnnnnnnnnnnnnnnnnnnnnnnnnnnnnnnnnnnnnnnnnnnnnnnnnnnnnnnnnnnnnnnnnnnnnnnnnnnnnnnnnnnnnnnnnnnnnnnnnnnnnnnnnnnnnnnnnnnnnnnnnnnnnnnnnnnnnnnnnnnnnnnnnnnnnnnnnnnnnnnnnnnnnnnnnnnnnnnnnnnnnnnnnnnnnnnnnnnnnnnnnnnnnnnnnnnnnnnnnnnnnnnnnnnnnnnnnnnnnnnnnnnnnnnnnnnnnnnnnnnnnnnnnnnnnnnnnnnnnnnnnnnnnnnnnnnnnnnnnnnnnnnnnnnnnnnnnnnnnnnnnnnnnnnnnnnnnnnnnnnnnnnnnnnnnnnnnnnnnnnnnnnnnnnnnnnnnnnnnnnnnnnnnnnnnnnnnnnnnnnnnnnnnnnnnnnnnnnnnnnnnnnnnnnnnnnnnnnnnnnnnnnnnnnnnnnnnnnnnnnnnnnnnnnnnnnnnnnnnnnnnnnnnnnnnnnnnnnnnnnnnnnnnnnnnnnnnnnnnnnnnnnnnnnnnnnnnnnnnnnnnnnnnnnnnnnnnnnnnnnnnnnnnnnnnnnnnnnnnnnnnnnnnnnnnnnnnnnnnnnnnnnnnnnnnnnnnnnnnnnnnnnnnnnnnnnnnnnnnnnnnnnnnnnnnnnnnnnnnnnnnnnnnnnnnnnnnnnnnnnnnnnnnnnnnnnnnnnnnnnnnnnnnnnnnnnnnnnnnnnnnnnnnnnnnnnnnnnnnnnnnnnnnnnnnnnnnnnnnnnnnnnnnnnnnnnnnnnnnnnnnnnnnnnnnnnnnnnnnnnnnnnnnnnnnnnnnnnnnnnnnnnnnnnnnnnnnnnnnnnnnnnnnnnnnnnnnnnnnnnnnnnnnnnnnnnnnnnnnnnnnnnnnnnnnnnnnnnnnnnnnnnnnnnnnnnnnnnnnnnnnnnnnnnnnnnnnnnnnnnnnnnnnnnnnnnnnnnnnnnnnnnnnnnnnnnnnnnnnnnnnnnnnnnnnnnnnnnnnnnnnnnnnnnnnnnnnnnnnnnnnnnnnnnnnnnnnnnnnnnnnnnnnnnnnnnnnnnnnnnnnnnnnnnnnnnnnnnnnnnnnnnnnnnnnnnnnnnnnnnnnnnnnnnnnnnnnnnnnnnnnnnnnnnnnnnnnnnnnnnnnnnnnnnnnnnnnnnnnnnnnnnnnnnnnnnnnnnnnnnnnnnnnnnnnnnnnnnnnnnnnnnnnnnnnnnnnnnnnnnnnnnnnnnnnnnnnnnnnnnnnnnnnnnnnnnnnnnnnnnnnnnnnnnnnnnnnnnnnnnnnnnnnnnnnnnnnnnnnnnnnnnnnnnnnnnnnnnnnnnnnnnnnnnnnnnnnnnnnnnnnnnnnnnnnnnnnnnnnnnnnnnnnnnnnnnnnnnnnnnnnnnnnnnnnnnnnnnnnnnnnnnnnnnnnnnnnnnnnnnnnnnnnnnnnnnnnnnnnnnnnnnnnnnnnnnnnnnnnnnnnnnnnnnnnnnnnnnnnnnnnnnnnnnnnnnnnnnnnnnnnnnnnnnnnnnnnnnnnnnnnnnnnnnnnnnnnnnnnnnnnnnnnnnnnnnnnnnnnnnnnnnnnnnnnnnnnnnnnnnnnnnnnnnnnnnnnnnnnnnnnnnnnnnnnnnnnnnnnnnnnnnnnnnnnnnnnnnnnnnnnnnnnnnnnnnnnnnnnnnnnnnnnnnnnnnnnnnnnnnnnnnnnnnnnnnnnnnnnnnnnnnnnnnnnnnnnnnnnnnnnnnnnnnnnnnnnnnnnnnnnnnnnnnnnnnnnnnnnnnnnnnnnnnnnnnnnnnnnnnnnnnnnnnnnnnnnnnnnnnnnnnnnnnnnnnnnnnnnnnnnnnnnnnnnnnnnnnnnnnnnnnnnnnnnnnnnnnnnnnnnnnnnnnnnnnnnnnnnnnnnnnnnnnnnnnnnnnnnnnnnnnnnnnnnnnnnnnnnnnnnnnnnnnnnnnnnnnnnnnnnnnnnnnnnnnnnnnnnnnnnnnnnnnnnnnnnnnnnnnnnnnnnnnnnnnnnnnnnnnnnnnnnnnnnnnnnnnnnnnnnnnnnnnnnnnnnnnnnnnnnnnnnnnnnnnnnnnnnnnnnnnnnnnnnnnnnnnnnnnnnnnnnnnnnnnnnnnnnnnnnnnnnnnnnnnnnnnnnnnnnnnnnnnnnnnnnnnnnnnnnnnnnnnnnnnnnnnnnnnnnnnnnnnnnnnnnnnnnnnnnnnnnnnnnnnnnnnnnnnnnnnnnnnnnnnnnnnnnnnnnnnnnnnnnnnnnnnnnnnnnnnnnnnnnnnnnnnnnnnnnnnnnnnnnnnnnnnnnnnnnnnnnnnnnnnnnnnnnnnnnnnnnnnnnnnnnnnnnnnnnnnnnnnnnnnnnnnnnnnnnnnnnnnnnnnnnnnnnnnnnnnnnnnnnnnnnnnnnnnnnnnnnnnnnnnnnnnnnnnnnnnnnnnnnnnnnnnnnnnnnnnnnnnnnnnnnnnnnnnnnnnnnnnnnnnnnnnnnnnnnnnnnnnnnnnnnnnnnnnnnnnnnnnnnnnnnnnnnnnnnnnnnnnnnnnnnnnnnnnnnnnnnnnnnnnnnnnnnnnnnnnnnnnnnnnnnnnnnnnnnnnnnnnnnnnnnnnnnnnnnnnnnnnnnnnnnnnnnnnnnnnnnnnnnnnnnnnnnnnnnnnnnnnnnnnnnnnnnnnnnnnnnnnnnnnnnnnnnnnnnnnnnnnnnnnnnnnnnnnnnnnnnnnnnnnnnnnnnnnnnnnnnnnnnnnnnnnnnnnnnnnnnnnnnnnnnnnnnnnnnnnnnnnnnnnnnnnnnnnnnnnnnnnnnnnnnnnnnnnnnnnnnnnnnnnnnnnnnnnnnnnnnnnnnnnnnnnnnnnnnnnnnnnnnnnnnnnnnnnnnnnnnnnnnnnnnnnnnnnnnnnnnnnnnnnnnnnnnnnnnnnnnnnnnnnnnnnnnnnnnnnnnnnnnnnnnnnnnnnnnnnnnnnnnnnnnnnnnnnnnnnnnnnnnnnnnnnnnnnnnnnnnnnnnnnnnnnnnnnnnnnnnnnnnnnnnnnnnnnnnnnnnnnnnnnnnnnnnnnnnnnnnnnnnnnnnnnnnnnnnnnnnnnnnnnnnnnnnnnnnnnnnnnnnnnnnnnnnnnnnnnnnnnnnnnnnnnnnnnnnnnnnnnnnnnnnnnnnnnnnnnnnnnnnnnnnnnnnnnnnnnnnnnnnnnnnnnnnnnnnnnnnnnnnnnnnnnnnnnnnnnnnnnnnnnnnnnnnnnnnnnnnnnnnnnnnnnnnnnnnnnnnnnnnnnnnnnnnnnnnnnnnnnnnnnnnnnnnnnnnnnnnnnnnnnnnnnnnnnnnnnnnnnnnnnnnnnnnnnnnnnnnnnnnnnnnnnnnnnnnnnnnnnnnnnnnnnnnnnnnnnnnnnnnnnnnnnnnnnnnnnnnnnnnnnnnnnnnnnnnnnnnnnnnnnnnnnnnnnnnnnnnnnnnnnnnnnnnnnnnnnnnnnnnnnnnnnnnnnnnnnnnnnnnnnnnnnnnnnnnnnnnnnnnnnnnnnnnnnnnnnnnnnnnnnnnnnnnnnnnnnnnnnnnnnnnnnnnnnnnnnnnnnnnnnnnnnnnnnnnnnnnnnnnnnnnnnnnnnnnnnnnnnnnnnnnnnnnnnnnnnnnnnnnnnnnnnnnnnnnnnnnnnnnnnnnnnnnnnnnnnnnnnnnnnnnnnnnnnnnnnnnnnnnnnnnnnnnnnnnnnnnnnnnnnnnnnnnnnnnnnnnnnnnnnnnnnnnnnnnnnnnnnnnnnnnnnnnnnnnnnnnnnnnnnnnnnnnnnnnnnnnnnnnnnnnnnnnnnnnnnnnnnnnnnnnnnnnnnnnnnnnnnnnnnnnnnnnnnnnnnnnnnnnnnnnnnnnnnnnnnnnnnnnnnnnnnnnnnnnnnnnnnnnnnnnnnnnnnnnnnnnnnnnnnnnnnnnnnnnnnnnnnnnnnnnnnnnnnnnnnnnnnnnnnnnnnnnnnnnnnnnnnnnnnnnnnnnnnnnnnnnnnnnnnnnnnnnnnnnnnnnnnnnnnnnnnnnnnnnnnnnnnnnnnnnnnnnnnnnnnnnnnnnnnnnnnnnnnnnnnnnnnnnnnnnnnnnnnnnnnnnnnnnnnnnnnnnnnnnnnnnnnnnnnnnnnnnnnnnnnnnnnnnnnnnnnnnnnnnnnnnnnnnnnnnnnnnnnnnnnnnnnnnnnnnnnnnnnnnnnnnnnnnnnnnnnnnnnnnnnnnnnnnnnnnnnnnnnnnnnnnnnnnnnnnnnnnnnnnnnnnnnnnnnnnnnnnnnnnnnnnnnnnnnnnnnnnnnnnnnnnnnnnnnnnnnnnnnnnnnnnnnnnnnnnnnnnnnnnnnnnnnnnnnnnnnnnnnnnnnnnnnnnnnnnnnnnnnnnnnnnnnnnnnnnnnnnnnnnnnnnnnnnnnnnnnnnnnnnnnnnnnnnnnnnnnnnnnnnnnnnnnnnnnnnnnnnnnnnnnnnnnnnnnnnnnnnnnnnnnnnnnnnnnnnnnnnnnnnnnnnnnnnnnnnnnnnnnnnnnnnnnnnnnnnnnnnnnnnnnnnnnnnnnnnnnnnnnnnnnnnnnnnnnnnnnnnnnnnnnnnnnnnnnnnnnnnnnnnnnnnnnnnnnnnnnnnnnnnnnnnnnnnnnnnnnnnnnnnnnnnnnnnnnnnnnnnnnnnnnnnnnnnnnnnnnnnnnnnnnnnnnnnnnnnnnnnnnnnnnnnnnnnnnnnnnnnnnnnnnnnnnnnnnnnnnnnnnnnnnnnnnnnnnnnnnnnnnnnnnnnnnnnnnnnnnnnnnnnnnnnnnnnnnnnnnnnnnnnnnnnnnnnnnnnnnnnnnnnnnnnnnnnnnnnnnnnnnnnnnnnnnnnnnnnnnnnnnnnnnnnnnnnnnnnnnnnnnnnnnnnnnnnnnnnnnnnnnnnnnnnnnnnnnnnnnnnnnnnnnnnnnnnnnnnnnnnnnnnnnnnnnnnnnnnnnnnnnnnnnnnnnnnnnnnnnnnnnnnnnnnnnnnnnnnnnnnnnnnnnnnnnnnnnnnnnnnnnnnnnnnnnnnnnnnnnnnnnnnnnnnnnnnnnnnnnnnnnnnnnnnnnnnnnnnnnnnnnnnnnnnnnnnnnnnnnnnnnnnnnnnnnnnnnnnnnnnnnnnnnnnnnnnnnnnnnnnnnnnnnnnnnnnnnnnnnnnnnnnnnnnnnnnnnnnnnnnnnnnnnnnnnnnnnnnnnnnnnnnnnnnnnnnnnnnnnnnnnnnnnnnnnnnnnnnnnnnnnnnnnnnnnnnnnnnnnnnnnnnnnnnnnnnnnnnnnnnnnnnnnnnnnnnnnnnnnnnnnnnnnnnnnnnnnnnnnnnnnnnnnnnnnnnnnnnnnnnnnnnnnnnnnnnnnnnnnnnnnnnnnnnnnnnnnnnnnnnnnnnnnnnnnnnnnnnnnnnnnnnnnnnnnnnnnnnnnnnnnnnnnnnnnnnnnnnnnnnnnnnnnnnnnnnnnnnnnnnnnnnnnnnnnnnnnnnnnnnnnnnnnnnnnnnnnnnnnnnnnnnnnnnnnnnnnnnnnnnnnnnnnnnnnnnnnnnnnnnnnnnnnnnnnnnnnnnnnnnnnnnnnnnnnnnnnnnnnnnnnnnnnnnnnnnnnnnnnnnnnnnnnnnnnnnnnnnnnnnnnnnnnnnnnnnnnnnnnnnnnnnnnnnnnnnnnnnnnnnnnnnnnnnnnnnnnnnnnnnnnnnnnnnnnnnnnnnnnnnnnnnnnnnnnnnnnnnnnnnnnnnnnnnnnnnnnnnnnnnnnnnnnnnnnnnnnnnnnnnnnnnnnnnnnnnnnnnnnnnnnnnnnnnnnnnnnnnnnnnnnnnnnnnnnnnnnnnnnnnnnnnnnnnnnnnnnnnnnnnnnnnnnnnnnnnnnnnnnnnnnnnnnnnnnnnnnnnnnnnnnnnnnnnnnnnnnnnnnnnnnnnnnnnnnnnnnnnnnnnnnnnnnnnnnnnnnnnnnnnnnnnnnnnnnnnnnnnnnnnnnnnnnnnnnnnnnnnnnnnnnnnnnnnnnnnnnnnnnnnnnnnnnnnnnnnnnnnnnnnnnnnnnnnnnnnnnnnnnnnnnnnnnnnnnnnnnnnnnnnnnnnnnnnnnnnnnnnnnnnnnnnnnnnnnnnnnnnnnnnnnnnnnnnnnnnnnnnnnnnnnnnnnnnnnnnnnnnnnnnnnnnnnnnnnnnnnnnnnnnnnnnnnnnnnnnnnnnnnnnnnnnnnnnnnnnnnnnnnnnnnnnnnnnnnnnnnnnnnnnnnnnnnnnnnnnnnnnnnnnnnnnnnnnnnnnnnnnnnnnnnnnnnnnnnnnnnnnnnnnnnnnnnnnnnnnnnnnnnnnnnnnnnnnnnnnnnnnnnnnnnnnnnnnnnnnnnnnnnnnnnnnnnnnnnnnnnnnnnnnnnnnnnnnnnnnnnnnnnnnnnnnnnnnnnnnnnnnnnnnnnnnnnnnnnnnnnnnnnnnnnnnnnnnnnnnnnnnnnnnnnnnnnnnnnnnnnnnnnnnnnnnnnnnnnnnnnnnnnnnnnnnnnnnnnnnnnnnnnnnnnnnnnnnnnnnnnnnnnnnnnnnnnnnnnnnnnnnnnnnnnnnnnnnnnnnnnnnnnnnnnnnnnnnnnnnnnnnnnnnnnnnnnnnnnnnnnnnnnnnnnnnnnnnnnnnnnnnnnnnnnnnnnnnnnnnnnnnnnnnnnnnnnnnnnnnnnnnnnnnnnnnnnnnnnnnnnnnnnnnnnnnnnnnnnnnnnnnnnnnnnnnnnnnnnnnnnnnnnnnnnnnnnnnnnnnnnnnnnnnnnnnnnnnnnnnnnnnnnnnnnnnnnnnnnnnnnnnnnnnnnnnnnnnnnnnnnnnnnnnnnnnnnnnnnnnnnnnnnnnnnnnnnnnnnnnnnnnnnnnnnnnnnnnnnnnnnnnnnnnnnnnnnnnnnnnnnnnnnnnnnnnnnnnnnnnnnnnnnnnnnnnnnnnnnnnnnnnnnnnnnnnnnnnnnnnnnnnnnnnnnnnnnnnnnnnnnnnnnnnnnnnnnnnnnnnnnnnnnnnnnnnnnnnnnnnnnnnnnnnnnnnnnnnnnnnnnnnnnnnnnnnnnnnnnnnnnnnnnnnnnnnnnnnnnnnnnnnnnnnnnnnnnnnnnnnnnnnnnnnnnnnnnnnnnnnnnnnnnnnnnnnnnnnnnnnnnnnnnnnnnnnnnnnnnnnnnnnnnnnnnnnnnnnnnnnnnnnnnnnnnnnnnnnnnnnnnnnnnnnnnnnnnnnnnnnnnnnnnnnnnnnnnnnnnnnnnnnnnnnnnnnnnnnnnnnnnnnnnnnnnnnnnnnnnnnnnnnnnnnnnnnnnnnnnnnnnnnnnnnnnnnnnnnnnnnnnnnnnnnnnnnnnnnnnnnnnnnnnnnnnnnnnnnnnnnnnnnnnnnnnnnnnnnnnnnnnnnnnnnnnnnnnnnnnnnnnnnnnnnnnnnnnnnnnnnnnnnnnnnnnnnnnnnnnnnnnnnnnnnnnnnnnnnnnnnnnnnnnnnnnnnnnnnnnnnnnnnnnnnnnnnnnnnnnnnnnnnnnnnnnnnnnnnnnnnnnnnnnnnnnnnnnnnnnnnnnnnnnnnnnnnnnnnnnnnnnnnnnnnnnnnnnnnnnnnnnnnnnnnnnnnnnnnnnnnnnnnnnnnnnnnnnnnnnnnnnnnnnnnnnnnnnnnnnnnnnnnnnnnnnnnnnnnnnnnnnnnnnnnnnnnnnnnnnnnnnnnnnnnnnnnnnnnnnnnnnnnnnnnnnnnnnnnnnnnnnnnnnnnnnnnnnnnnnnnnnnnnnnnnnnnnnnnnnnnnnnnnnnnnnnnnnnnnnnnnnnnnnnnnnnnnnnnnnnnnnnnnnnnnnnnnnnnnnnnnnnnnnnnnnnnnnnnnnnnnnnnnnnnnnnnnnnnnnnnnnnnnnnnnnnnnnnnnnnnnnnnnnnnnnnnnnnnnnnnnnnnnnnnnnnnnnnnnnnnnnnnnnnnnnnnnnnnnnnnnnnnnnnnnnnnnnnnnnnnnnnnnnnnnnnnnnnnnnnnnnnnnnnnnnnnnnnnnnnnnnnnnnnnnnnnnnnnnnnnnnnnnnnnnnnnnnnnnnnnnnnnnnnnnnnnnnnnnnnnnnnnnnnnnnnnnnnnnnnnnnnnnnnnnnnnnnnnnnnnnnnnnnnnnnnnnnnnnnnnnnnnnnnnnnnnnnnnnnnnnnnnnnnnnnnnnnnnnnnnnnnnnnnnnnnnnnnnnnnnnnnnnnnnnnnnnnnnnnnnnnnnnnnnnnnnnnnnnnnnnnnnnnnnnnnnnnnnnnnnnnnnnnnnnnnnnnnnnnnnnnnnnnnnnnnnnnnnnnnnnnnnnnnnnnnnnnnnnnnnnnnnnnnnnnnnnnnnnnnnnnnnnnnnnnnnnnnnnnnnnnnnnnnnnnnnnnnnnnnnnnnnnnnnnnnnnnnnnnnnnnnnnnnnnnnnnnnnnnnnnnnnnnnnnnnnnnnnnnnnnnnnnnnnnnnnnnnnnnnnnnnnnnnnnnnnnnnnnnnnnnnnnnnnnnnnnnnnnnnnnnnnnnnnnnnnnnnnnnnnnnnnnnnnnnnnnnnnnnnnnnnnnnnnnnnnnnnnnnnnnnnnnnnnnnnnnnnnnnnnnnnnnnnnnnnnnnnnnnnnnnnnnnnnnnnnnnnnnnnnnnnnnnnnnnnnnnnnnnnnnnnnnnnnnnnnnnnnnnnnnnnnnnnnnnnnnnnnnnnnnnnnnnnnnnnnnnnnnnnnnnnnnnnnnnnnnnnnnnnnnnnnnnnnnnnnnnnnnnnnnnnnnnnnnnnnnnnnnnnnnnnnnnnnnnnnnnnnnnnnnnnnnnnnnnnnnnnnnnnnnnnnnnnnnnnnnnnnnnnnnnnnnnnnnnnnnnnnnnnnnnnnnnnnnnnnnnnnnnnnnnnnnnnnnnnnnnnnnnnnnnnnnnnnnnnnnnnnnnnnnnnnnnnnnnnnnnnnnnnnnnnnnnnnnnnnnnnnnnnnnnnnnnnnnnnnnnnnnnnnnnnnnnnnnnnnnnnnnnnnnnnnnnnnnnnnnnnnnnnnnnnnnnnnnnnnnnnnnnnnnnnnnnnnnnnnnnnnnnnnnnnnnnnnnnnnnnnnnnnnnnnnnnnnnnnnnnnnnnnnnnnnnnnnnnnnnnnnnnnnnnnnnnnnnnnnnnnnnnnnnnnnnnnnnnnnnnnnnnnnnnnnnnnnnnnnnnnnnnnnnnnnnnnnnnnnnnnnnnnnnnnnnnnnnnnnnnnnnnnnnnnnnnnnnnnnnnnnnnnnnnnnnnnnnnnnnnnnnnnnnnnnnnnnnnnnnnnnnnnnnnnnnnnnnnnnnnnnnnnnnnnnnnnnnnnnnnnnnnnnnnnnnnnnnnnnnnnnnnnnnnnnnnnnnnnnnnnnnnnnnnnnnnnnnnnnnnnnnnnnnnnnnnnnnnnnnnnnnnnnnnnnnnnnnnnnnnnnnnnnnnnnnnnnnnnnnnnnnnnnnnnnnnnnnnnnnnnnnnnnnnnnnnnnnnnnnnnnnnnnnnnnnnnnnnnnnnnnnnnnnnnnnnnnnnnnnnnnnnnnnnnnnnnnnnnnnnnnnnnnnnnnnnnnnnnnnnnnnnnnnnnnnnnnnnnnnnnnnnnnnnnnnnnnnnnnnnnnnnnnnnnnnnnnnnnnnnnnnnnnnnnnnnnnnnnnnnnnnnnnnnnnnnnnnnnnnnnnnnnnnnnnnnnnnnnnnnnnnnnnnnnnnnnnnnnnnnnnnnnnnnnnnnnnnnnnnnnnnnnnnnnnnnnnnnnnnnnnnnnnnnnnnnnnnnnnnnnnnnnnnnnnnnnnnnnnnnnnnnnnnnnnnnnnnnnnnnnnnnnnnnnnnnnnnnnnnnnnnnnnnnnnnnnnnnnnnnnnnnnnnnnnnnnnnnnnnnnnnnnnnnnnnnnnnnnnnnnnnnnnnnnnnnnnnnnnnnnnnnnnnnnnnnnnnnnnnnnnnnnnnnnnnnnnnnnnnnnnnnnnnnnnnnnnnnnnnnnnnnnnnnnnnnnnnnnnnnnnnnnnnnnnnnnnnnnnnnnnnnnnnnnnnnnnnnnnnnnnnnnnnnnnnnnnnnnnnnnnnnnnnnnnnnnnnnnnnnnnnnnnnnnnnnnnnnnnnnnnnnnnnnnnnnnnnnnnnnnnnnnnnnnnnnnnnnnnnnnnnnnnnnnnnnnnnnnnnnnnnnnnnnnnnnnnnnnnnnnnnnnnnnnnnnnnnnnnnnnnnnnnnnnnnnnnnnnnnnnnnnnnnnnnnnnnnnnnnnnnnnnnnnnnnnnnnnnnnnnnnnnnnnnnnnnnnnnnnnnnnnnnnnnnnnnnnnnnnnnnnnnnnnnnnnnnnnnnnnnnnnnnnnnnnnnnnnnnnnnnnnnnnnnnnnnnnnnnnnnnnnnnnnnnnnnnnnnnnnnnnnnnnnnnnnnnnnnnnnnnnnnnnnnnnnnnnnnnnnnnnnnnnnnnnnnnnnnnnnnnnnnnnnnnnnnnnnnnnnnnnnnnnnnnnnnnnnnnnnnnnnnnnnnnnnnnnnnnnnnnnnnnnnnnnnnnnnnnnnnnnnnnnnnnnnnnnnnnnnnnnnnnnnnnnnnnnnnnnnnnnnnnnnnnnnnnnnnnnnnnnnnnnnnnnnnnnnnnnnnnnnnnnnnnnnnnnnnnnnnnnnnnnnnccacaaatacacacaccacacaccccaaacacacagcacacacaccacacacacatcacacacagaaaacacaatacacaccacacaccacacacaccccacagatacacacaccacacacaccacacacacacccccacaaatacaccacacacaccacacacacacaccccacacacatcacacacaccacacacagaaaacacacaatacataacacacaccacacacacaccacacacacaccccacatcacacacagaacacacacaatacacaacacacaccacacacaccacacaaacacaaacatcacacacaccacacacacaacacacacaatgcacaatacacaccacacacacaccccacaaacaccacacacaacacacacaaaacacacaccacacacacaccacacacaccacccacccccacacacatcacacacaccatatacaacagacatcacacccacaccacacaccacacacacacccacacacacccacaaacacaccacaaacaccacacaccacacacacaccagaaacacccacatcacacacactacacacagaacacacacaatacccaatagacaccacacacaccacacacaacgccacacacacaccacacaccccccacacacacaccccacacacaccccacaaacacacatctcacacacacagaacacaaatacacaccacacaccacacacacagcacacacagaacacacacaacacacaccacataccacacgccacacacacagcacacacaatacacacaccacacacaacacacacaacacataaacacacactatacacacatgacacacacacatcacacacaccactcacgatacacacacaccacacatgatgcacacacaccacacacgcacaccacacacacaacacacatacaccacacacaccactcacgatacacacacaccacacacaacacacatgacacatccacacaacacacgcggggcacacacagagacactacacagacaatacatgacatacatgacacacacaacacacgagacacaaacatggcacacacaccgcacgcatgacacacagacacacacacgacagaaggagagacagagtttgggtcaagagccacatcccctgcagattcctgggctgggcacactcagatcccgggctctgcaggcagctccaccgcacccagggtctcagtacctctggaggccgtgtcccccagtctcactcagcgccttcagccccccgccccagccccaaggctcaggcccacggcagcccctcaggccaagggactcaccaaggttggcccaaactctccgtagtccattggctcacagagacacacacacacagacgcacacagatggacacagacacacaccgacatgcacagatgcacacagatgcatattgagacacacacagatgcacacagacacacacacatgcatattgagacagacacacacagacacacacagatgcacatagacacagacacacacagatgcacatagacacagacgcacacacagagacacacacagatgcacattgaggcacacatagacacacaaaaatacagacacagatgcacatagagacacacatagacacacaggcacacacaaacacacatagagacctacatacagagacacacacacagatgcacatagacacacacagagtcacagacacacacacacacagattcacatagggacacacagacacacagatacatatagagacaggcacatacacacacagacacacactggcaaacatagagacacagacacaaacagagacaaacacacacatagagacaaacagagacacacaaagacacacatagagacacacacgggcacgcacacaagcacaggcacacacagacacagacacacatagacccacatagagacacacagacacacacatagacacatagacatacatattctctgccagaacaagccagtctccagacgtgggcaggtaggaggggcaggggcagatgcagagtgacggcctctccccagccagccgtccagatgctggggcaggtccgggtgcccaggggctggtggcgcaactgaagagcccagctgcaaggggagtttcctcagaggtggctttaaatctctgcctctggccagcagaactggctgtggcggagagagcagtgtgtccaaggggtgcctcccagcagggcgggtcagaggctgggcttcctcgcacaatctccagagaaagggagctcctcccaggcctgcctgtggctagactgacctctccacctgctctcttgcccaggctggagtgcagtgcactccatcaaggagtgacctggtgctcttttttctctttacttaaaaaaatactatgaaaataacacatgcacgtgtttaaaaaccaaatagggctgggagtagtggctcatgcctgtaatcccaacactttgggaggccaagacaggaggatcgcttgaagcctggaggtgaagaccaacctgggcagcatagtaagacctcatctcaaagaaaaaaagaaattctacacaaacttccaaaaaaatagaaaaagagggaatattttccagctcattttatgagatcagcactaccctggtaccaaaaccgggccatttccttattacagggaaaaaaaattgcataaatatccttaatgaacataggtacaaaaaattattaataaaatgttagaaaatcaaatatggatatatatatatataatgaccaagtgagatttatctcagaaatccaaggttggtaaaacatttgtaaatcaatgtaattcaaccatagcaatagactaagaaagaaaaactataagatcatctcattaaaaaagaaataaaaatttgatgaactttgacatccattcatgataaaaactctcagcagctatggattgacggaaacattttcaaattgataaagagagtctgcgaaaaccctaggaaaggccgggtgcggtggctcactcctgtaatccctgcactttgggaggctgaggcaggcggatcatgaggtcaagagattgagacaatcctggccaacatgatgaaaccccgtctctactaaaaatacaaaaatagccgggcatggtggcgcacgcctgtaatcccagctagtcgggaggctgaggcacaagaatcacttgaacctgggaggtggaggttgcagtgagccgagatcgcgccattgcactccagcctgggccacagaacgagactccacctcaaaaaaaaaaccgagatatcatgacacacctactagtatggataaaaatatcaaacaaaccggccaggtgcatcggctcatgcctgtaatcccagcacttcgggaggctgttgctctgttgcctgggctggagtgctatggcacgatctcggctcacggcagcctccacctcctgggctcaagcaaatcctcctaccccagccgccccagtgccggggcctcccggcttgtcccccccggcctggctattttgtatttttttttttttttttttgtataaatgaggtctcgctatgttgcccaggctggtcttgaacttctgagctcaagggatcctcctgccttggcctcccaaactgctgggattacaggtgtgagccactccacccaacctcagacactcaactttctttctttttttctttctnnnnnnnnnnnnnnnnnnnnnnnnnnnnnnnnnnnnnnnnnnnnnnnnnnnnnnnnnnnnnnnnnnnnnnnnnnnnnnnnnnnnnnnnnnnnnnnnnnnnnnnnnnnnnnnnnnnnnnnnnnnnnnnnnnnnnnnnnnnnnnnnnnnnnnnnnnnnnnnnnnnnnnnnnnnnnnnnnnnnnnnnnnnnnnnnnnnnnnnnnnnnnnnnnnnnnnnnnnnnnnnnnnnnnnnnnnnnnnnnnnnnnnnnnnnnnnnnnnnnnnnnnnnnnnnnnnnnnnnnnnnnnnnnnnnnnnnnnnnnnnnnnnnnnnnnnnnnnnnnnnnnnnnnnnnnnnnnnnnnnnnnnnnnnnnnnnnnnnnnnnnnnnnnnnnnnnnnnnnnnnnnnnnnnnnnnnnnnnnnnnnnnnnnnnnnnnnnnnnnnnnnnnnnnnnnnnnnnnnnnnnnnnnnnnnnnnnnnnnnnnnnnnnnnnnnnnnnnnnnnnnnnnnnnnnnnnnnnnnnnnnnnnnnnnnnnnnnnnnnnnnnnnnnnnnnnnnnnnnnnnnnnnnnnnnnnnnnnnnnnnnnnnnnnnnnnnnnnnnnnnnnnnnnnnnnnnnnnnnnnnnnnnnnnnnnnnnnnnnnnnnnnnnnnnnnnnnnnnnnnnnnnnnnnnnnnnnnnnnnnnnnnnnnnnnnnnnnnnnnnnnnnnnnnnnnnnnnnnnnnnnnnnnnnnnnnnnnnnnnnnnnnnnnnnnnnnnnnnnnnnnnnnnnnnnnnnnnnnnnnnnnnnnnnnnnnnnnnnnnnnnnnnnnnnnnnnnnnnnnnnnnnnnnnnnnnnnnnnnnnnnnnnnnnnnnnnnnnnnnnnnnnnnnnnnnnnnnnnnnnnnnnnnnnnnnnnnnnnnnnnnnnnnnnnnnnnnnnnnnnnnnnnnnnnnnnnnnnnnnnnnnnnnnnnnnnnnnnnnnnnnnnnnnnnnnnnnnnnnnnnnnnnnnnnnnnnnnnnnnnnnnnnnnnnnnnnnnnnnnnnnnnnnnnnnnnnnnnnnnnnnnnnnnnnnnnnnnnnnnnnnnnnnnnnnnnnnnnnnnnnnnnnnnnnnnnnnnnnnnnnnnnnnnnnnnnnnnnnnnnnnnnnnnnnnnnnnnnnnnnnnnnnnnnnnnnnnnnnnnnnnnnnnnnnnnnnnnnnnnnnnnnnnnnnnnnnnnnnnnnnnnnnnnnnnnnnnnnnnnnnnnnnnnnnnnnnnnnnnnnnnnnnnnnnnnnnnnnnnnnnnnnnnnnnnnnnnnnnnnnnnnnnnnnnnnnnnnnnnnnnnnnnnnnnnnnnnnnnnnnnnnnnnnnnnnnnnnnnnnnnnnnnnnnnnnnnnnnnnnnnnnnnnnnnnnnnnnnnnnnnnnnnnnnnnnnnnnnnnnnnnnnnnnnnnnnnnnnnnnnnnnnnnnnnnnnnnnnnnnnnnnnnnnnnnnnnnnnnnnnnnnnncagaggcgcccctcacctcccggatggggcggctggccaggcggggggctgatccccccacctccctcccagacggggcggctggccgggcggggggctgaccccccacctccctcccggactgggcggctggccgggcggggggctgacccccccacctccctcctggacggggcgtctggccgggcagaggggctcctcacttcccagtaggggcggccgggcagaggagcccctcacctcccggacggggcggctggccgggcggggggctgaccccccccacctccctcccggacggggcggctgctgggcggagacgctcctcacttcccagacggggtggttgccggacggaggggctcctcacttctcagacggggcggctgcggggcagagggtttcctcacttctcagacggagcggccgggcagagacgctccccacctcccagacagggctgcggcccaggcagaggcgctcctcacatcccagacagggcggcggggcagaggtgctccccacatctcagacgatgggcggccgggcagagacgctcctcacttcctagatgggatggcggcggggaagaggcgctcctcgcttcccagatgggatggcggccgggcggagacgctcctcactttccagactgggcagccaggcagaggggctcctcacatcccagacgatgggtggccaagcagagacgctcctcacttcccagacggggtggcggccgggcagaggctgcaatctcggctctctgggaggccaaggcaggcggctgggaggtggttgcagcgagccgagatcacaccactgcactccagcctgggcaccattgagcactgagtgaacgagactccatctgcaatcccggcacctcgggaggccgaggctggcggatcactcgcggctaggagctggagaccagcccggccaacacagcgaaaccccgtctccaccaaaaaaaaaacgaaaccagtcnnnnnnnnnnnnnnnnnnnnnnnnnnnnnnnnnnnnnnnnnnnnnnnnnnnnnnnnnnnnnnnnnnnnnnnnnnnnnnnnnnnnnnnnnnnnnnnnnnnnnnnnnnnnnnnnnnnnnnnnnnnnnnnnnnnnnnnnnnnnnnnnnnnnnnnnnnnnnnnnnnnnnnnnnnnnnnnnnnnnnnnnnnnnnnnnnnnnnnnnnnnnnnnnnnnnnnnnnnnnnnnnnnnnnnnnnnnnnnnnnnnnnnnnnnnnnnnnnnnnnnnnnnnnnnnnnnnnnnnnnnnnnnnnnnnnnnnnnnnnnnnnnnnnnnnnnnnnnnnnnnnnnnnnnnnnnnnnnnnnnnnnnnnnnnnnnnnnnnnnnnnnnnnnnnnnnnnnnnnnnnnnnnnnnnnnnnnnnnnnnnnnnnnnnnnnnnnngattcttacttggccctcctaattgggtgttctcagtgaaaacgagacactgctaatatgctttagaaaatagccctcacattctccctgttcccaatcccccacttactctaagctccccaggagcaataattcagaagtcaaattgctcagcactcctatggttcaagtgattcttgtgtctcagcctcccaagtagctgggactacaggagcccaccaccacgcccagttaatttttgtattttttagtagagatggggtttcaccatgttgaccaggctggtctcgaactcctgacctcaagtgatccactggcctcggcctccaaaagtgttgggattacaggcgtgagccactgcgcccagcctcaaccttctagtgaaccctccatgctctgttatcttttattcctcttggatttttgttgtttcttttctttttcttcttctttttcttttctttttttttttttgagatggagtttcattcttgttgcccaggctggagtgcaatggcacaaccttggctcactgcaaccttcgcctcctgggttcaagcaatttgcctgcctcagcctcccaagtagctgggattacaggcatgtgctaccatgcctggcgaattttgtatttttagtagagacagggtttctccgtgttggtcgggctgatctcaaactcccgacctcaggtgatcagcccgccttggcctcccaaagtgctgagattacaggcatgagccaccacacccagcctttttgttgtttcttctgagagatttcttcaactcaattttccaacccttctattaaattttttaaattccagatattctatttgcagccggcaaggactcttcctgcgctctgcttgttttccaaagcattccgttctagtttttatgggagcatcatcctttcatgtctctaaggataatcagagtggttaaaatgttcttgaagttttcttctgttccctgcagtagctctgtttcctccagtttcctctttcccaagtgattggtctgtctcatatacctagaggtcttgctttgcattcacatctaagggcaaaaggcgctaggatgcagtgcggaggtccattcgctttgtcgtaaggtttgtgcctttcttagtcctgcagtggttgagtaaaacctgaccatcccacaccctcaaatactaagtgcccctgggtagtgatgtggaggggccttcttattaatgtgaggaaatgcttgtgttataggttgtggtgagaaacgctggttacaaaactatatcaaagtaaaaatgtattaatgcacagtaaagacacctggaaaaaaaatgccctttaatgctcacagaaggtctctccgaggggcagccccaccaccctcctgtttcccttcctgcatttccacgtttttctgggcccagatgcagcctcccctcccacccctggtccctccgccttggcttccggctgtcgctttcatccctcctcctcatcagccccttgcagaactccagggtggggcttctgagtctcgctggcagtatgggctccataagtcttgctggacaccgaaattaagttctgcaggtgccgtctccagaatccccagcacagatagacaaacccacatctcaggggtggggggtgcagacctgcccccagccccgctgcagcccgccccaggaccaagcacacctccaggagggccccctgcaatgagtaggaccctggggactggatggagggcaggtccccccacccccactgctgcttgggaaggccctgccccctccattcccagctgccctctgtttatatgtctcaccaatgtcaagggaaaccagaactggatagcagttgaaacacatattttgttcgggactattgtaataggggaaaaaagattttagtatagacctgggctcaactctcaatgtggcacaggcaagtggggatttagatctgaggagcagggcggggtcagtgggtggaaaattactggcacgaaacacctgtctggaggattctggctaaacccaggaaacaggaagcttgctgagggcaggcagggttagcagacatcgcctgggggtggcggaggctgagaaccctacccaggtaaaatgaagcttgctgacggcagacagggttagcagacacggcctggaggtggcagaggctaaggaacctacccaggtaaaacgaagcttgctgacggcagacagggttagcagacacggcctggaggtggcagaggctaaggaacctaccaaggtaaaatgaagcttgctgaaggcagccagggtgagcagatattgcctgggggtggcggaaactgaggaccctacccaggtaaaaggaagcctgctgaaggcaggcagggtgagcagacattgcctgtgggtagcagaggctgaggactctacccaggtaacaggaatcttgcttaaggcaggcaaggtgagcagacatcgcctgggggtggcggaggctgaggactctacccagataacaggaatcttgctgcgggcagccagggtgagcagacgtcgcctgggggtggtggaagctgaggaccctacccaggtaaaaggaagcttgctgaaggcaggcaaggtaagcagacatcgcctgggggtggcggaggctgaggaccctgatcagatatggggggatggaggcttcttgccaaactgacttagcagagttcttgctgaatctggattttataaggcagaatgcagatgagcctgtgagaaggttctgaagccggactacagtttggtcaagcaaacaatcttgtcatggattcagtcatataaataagggtcacccagcccaggggaggtgccccaccccatctgttccctctccctccccacactgagtccgaacctttcaggctttgcccccttcacacactccaaatttattcttctacttctcttcctgcaggtaccagactccggccacccagcgcttacctgggactgctgggcctctgccccgtggggacctgtcctccaggaaacaaggccagacacaggagggcagggaggactcttctccagggccggtgcgccgtctcttcagccccatggcacttgacttaggcagagcctacagcaccctcaccccagtccctgcagccaccaggaggtggtccccctcatcccattagccatcaccgccattcacagaggtctcggactgaggctggcagggggagcaccatgacccaagatcagaaccctgttgtctgtgcctctggagaggtgggggcaggagctgagggagggtttgggtggagaggggagaagatgcagtagcaggagcagatgctggcaggtagagacaaacttttatgacctttgccttctgacctttgcctctggccactgctccaactaaaacagaatggccccctctgggaacagggcttcctatgggctgggaagcatggagcccccacagtgtggctatgcaggggagtgaggaccaggtgggggcaggcctgtgggggtcacagagctgggctaagcttcagagggaagtggcccctgggagggggaatggctggggttaagaccctgggttcccacgcccccaaaacagaagtagaattagggagaaaggacccccaagaccaaggacggcacctatcagaggagctctccacgggcaggaggtgtcccagggtgagggtggccaggacaggtctagggaaatgcaggtggagcaggacccagagatggattggagatgccggaggggaggcttcctagcgggagcggagacaggcactgcagacaagtgtcagcgggaggggctctgggtggggaagaagactgggacttggaggaagacctctccagggagaagggaggagggggaaggagaaggggaggaagtgggaggaggagagtgctcatcctggaagccacagcctcggagagaactttctagaaggaaggcatgaccatcagtgtcccaggatgctgagaggccaggaaaggtgaggcctcaaggcgccatggggttgtggtgaccccaagatcactgggcacagagcagggatggctgggggtggaaggggaggggcgcgggctgaggttctagggccccaaagccaggtgtgatgtggctctagggggagtgaggaaggggagaatgtccctctgagcgtgcctcttggggaaggcaggggttctggctggggcttctccactcccaggaaaggaggtggtgtggaaggagcgggtgggacggaggagagagcgccccgcggccgcaggaccagcaggtgggggaccagggtcagcgctgctggaggggccttagcgcgacaggactggccagagaccggggatgtggcacagaaagagttaaagggcaccccagggaccgccctgccggtccacccatgtcacccatgttggcccctactccagcccccgtctgctctgcaggggaaggaaccgggagccgcggtgggggcgactgggggtgtcggtctttccagaaaatcaggcaggcatcaggaaagaaggggcgagaacccggggacgcgagaggaagggggcgagggggcgcccagggaggcggagggagcgagaggaaggggggctgagccacggcccccacgcccgcgcgcccctccgcgtcccagggcgtcccctcccggagctgggacccaccgcgaccaccacctgctgggccagggtccgcgggctcaggggtctgcaggattagggtctgcggaaccaggacccgtgggacaaaggtctgtggggcgcgggtccgcggggtggaattcagcgcgccgagtctgcgtatggccggggtacgaggcgctccctgcgcagggtgggcaggaccgaagctcgccgggaggctgcgcggagggcgggcggggaccctcggctgccgctcccacccccgcggggccgcccccgagcccgccctccgccgccgccctcgccctgcgtcgccgccggaaagtttgcaccgaccccgatctggcagcgccgcgaagacgagcggtcaccggcgcccgacccgagcgcgcccagaggacggcggggagccaagccgacccccgagcagcgccgcgcggtgagcacctgggccgcggccccgaggggacgttggggagtcgacccggtggggacagagaccgcggggcgggcgcggcggggccgggggcgcggggagcggggagccggccgggcggtctccggggtccgggctggtgcgctcctcagtcccgtcagacacccccgttcccaaccccggctcggacaccacccggtcctgcaccgtcgggcaggtccaggggtctcagcccctcccccgttctctggtcctggggggcgcggctgggggcgggggtgtcgctggccgcctggcgccctgcggcggccacactgcagcggccacactccccactcagggccccgggccccgccgccctggggagcgcacaaagcgccgcggacgcgtccccgaggcgcggggtctcaccagcgctgtctcccctcggtgggctcctgccccgaggactgcccggtggcaccggcgcggcccaggatggggtgaggggtgtctgcgccccgcctggccgctcctcttccgcggcccacactggcgactttgaccccggcaagcgggtcactgccctgcccggctccggcccccccggcgccccaccacccggccgactcggccaccgggcttatgctccgactctgaaccgactgaccccggccccctcggcgcccgcatcctccaaggaccggccagggctgctctctgcccttggtattggggacatcagggttggggggtctgggtgcacccacgcctgccccgcccccacggggtgagggcgcagggatagggctttgtcaacagcctgtggcccctgatcccgccccggtgccctgaccttccactaccttctctggtttcacaaaaacatcccggctcccatcccggagctcctcaaagcgtctgagaggccccttgcggacgccctgggagccccgctgccttcctggaccagtggccgctccacccatcctgggggcccagctccaggtctgcgggtccctcagccgcccccagtgggaatcggtggagcctgacgcagccaggagcgcccaagagtcacgtgttctgccagggaggacatgggacaggacacggggtgccagccctgcaaagcggccggggcagtggagctcaggtggccctaagccctggtggtggctggtgtggcccggcaggcagctgtgggagggaggaagggggtggcatgcggtgggggtctagagaaggcgggcagggcacctcgggagcccccccattgggcacctcgggaaccccccacattgggcacctcgggaaccctcccattgggcacctcgggaaccccccacattgggcacctcgggaacccccgcattgggcacctcgggaaccctcccattgggcacctcgggaacccccctattgggcacctcgggaacccccacattgggcacctcgggaaccccccctattgggcaccttgggaacccctcccctaattctcagctgactccaaggcctgagaaggagcttggtcacctggactgtgaaggtggagggtggggtccctggtgggtcgtcccacctaccagctgtgtcgccggaagggtaatacggagcactgtggccccggggagccccgagtggcagctccacagctgggagtttctgtccactccttcagtcaacaaacattgatcctgggctgaccggggcccgggggtgtcagtgtctcctctcgggggagagggctgggtgagatcaacagaggagcctcccttcttcccttcaggctggtgtcaccttcagtgatggggcagggtccccacttgggaagttaaatcgtcgtccccgtcccaggaccacagcagcctcagccctgctctccaggccaggctctctcatgggtgctcagctggaaattggtccccccccggctccacccacccctgttggggtgaggagctggagtctccctacccatatgggacccaccacccgcagggaacggaggacgctcacacttctgcacctcctgcctcactatcagagacccagtggagaattgcctcccacctcacctcttgtattcagaggccctgacccctagggatccgggactaggggtgccctatggggagcccacctgtggcctgtggatgctgagctgtcgggggaatcctccaggatccccagccccaccttcccaaccttctgttgaggctgaggggacacagagccccactcctgggtcctgactgtttcaaagaaaggcctgggggactgggcagccaacccctccctcggctcgctggggtctccagactggctgcccggctggaaggtggggccctggcacgcgaggacctcatgtgtggaggcactggcttggggggtgctcccagtggctctagagtcaacatgacaggcatcgaatggctcctgtttctctggcagagttggggcagagccaggcttggccacgctgggctctaaggggctgtcattttgcccagggagctcctggctgggtggtcctccccccagggtgagcacgcgtccccccccacccccacttcgaggcgcccaggcagggaacagctcattggccagtgtccttcctccttgtcccccgcctgcatctccaccatccaccctgctccagctgccccttgtccctctccccgtcccctgcccagagccccaggtctcccctgcacccctgagcctgcccacctagcagtgcccctcgtccagggcccctctgggttgggggtgcacacagtggggagaggcggctcctgctgctcctcacccagcccggctcagtggccggagccgcccaggacagtggcagtagatggggctgtttgatcaggatcagggaagataaggccccttgcgtgaccccagagctggggacgccaaaactgcccctcctcccccacccgcctgccgctgtctccgccagggagaggcccctactctgtgggtccttcgccccagcaccaagcctgcatggctgctcacctggctcaggaactggggatcagcgacacacgggtcctgcctcccatcggcccctacatgagcccagggtccaagggctgcggttgggagctctttagcagtctgtgacgcaggtgcctgtccctgtcattcagctgtcacactgcttggggcatctcaggccccgttagcggggcagccctgggtggagctggccccacgcgggctcacccagccgctacctggaggaggctaaaatccaggctgtcccgtggcagccagcagtccaggcctgcccggaaaccctctgctccagctgcagccttcgcccatctccttgcccctctccccggcttccccctggcactgccttccagctggctggccctccatctgcccagccatccatccacacctcttattccatttgagggtgccccaaagaagagcccgtaacagcccgggggctcatagccagccactcgcgggaccccgcacatgcacgtggacccacaggaagaccctccctgcttctcccacagaattcagttggtgcagaaactgggctctgtagcaacgaaaggccgatttgtgtagctgttgccaccccgaactcccagctcagatgctggctgtggcatggggaccaggggctgtgactcccacagccctggcaggcaccacgggggatgtcctccccaccctgtgcccccaccctaggccagctcctcctccaagtcgacgcccgcagtgctaacctcaaaggactgtgcagccagcctgtggcgtcccatgggatccaggaagcccaaccgagccttgcacggcacccacgaggcacctaggcaccccggtgctgggcagggggcacacatgtgacacagacccctgagtgtgggccccacacacttggcctggcacagctgcaagccagcccagccactttgctcgctgtggcactggggccaagtgatggaaggtccaggcaccgccaccctcacgcttggcacattggctcaggtcagcctggcaagccagctttcccaggggctaagaataggtgaggaggatggtgaggaagcagccgggggctgtcaactgagggaggaggtcaccatctggggaggctggtcccccacccaagagcattgggtcaacctgcaggaaggtggctgccaccagcaatgagacgaggggctctgcgaccctcagagctgccagccagccagccctgggtggcaagagtgactcctcctggggtctcctccctcctatcgccctctttttttttttttttttttttgagacggagtctcgctctgtcacccaggctggactgcaatggcttgatctccgctcactgcaagctctgcctcccgggttcacgccattctcctgcctcaagctcccgagtagctgggactacagacgcccgccaccacgcctggctaattttttgtatttttagtagagacggggtttcactgtgttagccaggatggtctcgatctccagacctcgtgatccacccccctcggcctcccaaagttctgggattacaggcgtgagccgccgcgcccggcccccagctccctctttatccctaggaccctgaggctcagaggggcagcttcaggggaggacaccccactggccaggacgccccaggctctgctgctctgccactcagctgccctcggaggagcgtacacacccaccaggactgcattgccccagctgtgcagcccctgccagatgtgggaggcagctagctgcccagaggcatgcccccctgccagccacagcgacccctgctgctgttgctgctgctgctggcctgccaggtgaggactcacagcaccctcagcacccaggggccctcctgtgaggactgcacactgatggctctctgtctgcctgcctgcctgcctgcctgtctgcctgcctgtctgtctgtctgcccgtctgcctgcccatctgcctgtctgtctgcctgtccgtctgtctgtccatctgtccatctgcctatccatctgcctgcctgtctgcctgtccgtctgcctgtctgtctgcctgtccatctgtccatctgcctatccatctgcctgcctgtctgtcggcctgcctgcctgcctgtctgtctgctgcctgtctgtccgtctgcctgtctgcctgtccgtctgcctgcctgtccgtctgcctgtccgtctgcctgcctgcctgtctgtctgcctgcctgtctgcctgcctgtccgtctgcctgtccgtctgcctgcctgtctgcctgcctgtctgcctgtctgcccgtctgcctgtctgtctgcctgtccgtctgcctgtctgtccgtctgtccatctgcctatccatctgcctgcctatctgtctgtccgtctgcctgcctgtctgtctgcctgtctgcctgtctgtctgcctgtctgtccatctgcctatccatctacctgcctgcctgtctgcctgtctgtctgcctgtctgtctgcctgcctgtctgtctgtctgtctggttgcttgtgcatgtgtcccccagccacaggtcccctccgctcaggtgatggacttcctgtttgagaagtggaagctctacggtgaccagtgtcaccacaacctgagcctgctgccccctcccacgggtgagccccccacccagagcctttcagcctgtgcctggcctcagcacttcctgagttctcttcatgggaaggttcctgggtgcttatgcagcctttgaggaccccgccaaggggccctgtcattcctcaggcccccaccaccgtgggcaggtgaggtaacgaggtaactgagccacagagctggggacttgcctcaggccgcagagccaggaaataacagaacggtggcattgccccagaaccggctgctgctgctgcccccaggcccagatgggtaataccacctacagccccgtggagttttcagtgggcagacagtgccagggcgtggaagctgggacccaggggcctgggagggctcgggtggagagtgtatatcatggcctggacacttggggtgcagggagaggatagggctggaggactcacccgggaggcagtgcctgggttcggatgagggaggcagccaccactgggcagaggggggcaggtgtggcagcctccattgggcagagggagcagatgtggcagccacaggtttggcgatgcacctgggaaggatgaaaatggcattggggttcagcccccagagagggaggtgctgagagaaggtcacggagaatgggggaccccagtgtgggtttggggcacatttgagatggggggtctccaagggaaggtgtcctgcagagctgcaattcagggctgggctgggcgtgctagcggaggctggtccaggggaggtggatggtcaggtgaggaaggtggaggtcagatgggggaggtggaggtcaagtgggggagggagcagcccaggccatgtcctgggcgaggtgacggccgagctcaggcttccagagagaggagagaggcctgctgagggagccccttctcccaccctgccctgccctgctctgccctgccctaccctaccctgcagagctggtgtgcaacagaaccttcgacaagtattcctgctggccggacacccccgccaataccacggccaacatctcctgcccctggtacctgccttggcaccacaaaggtacccatagaggggaggaactgtggggggggcgggcccagggtggggctgaccccagcctccccccacacccccagtgcaacaccgcttcgtgttcaagagatgcgggcccgacggtcagtgggtgcgtggaccccgggggcagccttggcgtgatgcctcccagtgccagatggatggcgaggagattgaggtccaggtcagtgggcggcaggcaggcgcggtggggctggatgggaacgggcatgggggcccctgcctggccctcacaggccactgtaactcgcagaaggaggtggccaagatgtacagcagcttccaggtgatgtacacagtgggctacagcctgtccctgggggccctgctcctcgccttggccatcctggggggcctcaggtaggattccgccagcgcccggggcggccgcagaggacagggaggaggacgggcgctgactggctgtgcccacagcaagctgcactgcacccgcaatgccatccacgcgaatctgtttgcgtccttcgtgctgaaagccagctccgtgctggtcattgatgggctgctcaggacccgctacagccagaaaattggcgacgacctcagtgtcagcacctggctcagtgatggagtgagcccccctcggcggccccaggcaggtgggtgggtgggcagccaggcaggtggccacgtagccgcgctcacactgcacctgtaccaggcggtggctggctgccgtgtggccgcggtgttcatgcaatatggcatcgtggccaactactgctggctgctggtggagggcctgtacctgcacaacctgctgggcctggccaccctccccgagaggagcttcttcagcctctacctgggcatcggctggggtgagtgggctggcatgagagggggttaaggcaggctgaccaagcctttgggaccacagctgctgccccccacaggtgcccccatgctgttcgtcgtcccctgggcagtggtcaagtgtctgttcgagaacgtccagtgagtatgagcggctggacagcctggggagggaccggggggctggggtgcggcgctctggcctgaggcagggaggggccggggatgagcctggtgcctggggagggggtcatttgtgaccttctcccttccttttctgagacccgaattagatcctggcaaaatcgggacgggggtgctgaggggcggaggggctgggggctgtgccccagtatgtgagtggcctggcctcgcaggtgctggaccagcaatgacaacatgggcttctggtggatcctgcggttccccgtcttcctggccatcctggtgaggaaatgaagagccaggagcgcaccccaggcccctcctcccttggcgtcctgaggctgccccaggagacagcagcatcctgtctgagagcgctgggagggagccggcacccagacaggacaccaggacactggccagcaccctggacactgagccaggctgttcctccctggctgtgtgcccaccagccccagggctatgtggcccagggcctatcttgctgccaggcccacctgcaggagggtcaggtggggccttccaagggcacagagctgttccctggggctcgggatgcccctgactcgcacccttctcacacagatcaacttcttcatcttcgtccgcatcgttcagctgctcgtggccaagctgcgggcacggcagatgcaccacacagactacaagttccggtgggtgccgcggcagctggcgtctcgagacctggagaccctcagggccagagggcagctgggggtggggactccaagctccacgtggatggtgcgggccgagggtgggggcggtgggtgactcaggcgctgcctctgcaggctggccaagtccacgctgaccctcatccctctgctgggcgtccacgaagtggtcttcgccttcgtgacggacgagcacgcccagggcaccctgcgctccgccaagctcttcttcgacctcttcctcagctccttccaggtgcccgcccgcccgccggctcccccgcccggggcgcagtgtgccacccctgaccaccctgtctctccagggcctgctggtggctgtcctctactgcttcctcaacaaggaggtaggtgggagtgggggcatctgagaccatcagcactggccgtcggggtcaggggcagagagaggcacagggatgccagccccacccctgcccgggggttggaacacgtggggcccaagcctttccctccccctgctcttattgggtgcagttgccatggcgctgggtgtcaggcccccaggacaggttggcctcagccccatcgctacggtgtccaccgtgggggtccccaggtgtctgcagactgctttccgtggcgatgctgggtggcatagctgtgcccagcagggagcttgtgtcgctctgcacccctcagagcggagactgggcatctccgatgaggcccacagcaggtcccggtggggtggagaggacaggcaggccctaggactggcctgccccgtccccctccccaggtgcagtcggagctgcggcggcgttggcaccgctggcgcctgggcaaagtgctatgggaggagcggaacaccagcaaccacagggcctcatcttcgcccggccacggccctcccagcaaggagctgcagtttgggaggggtggtggcagccaggattcatctgcggagacccccttggctggtggcctccctagattggctgagagccccttctgaaccctgctgggaccccagctagggctggactctggcacccagagggcgtcgctggacaacccagaactggacgcccagctgaggctgggggcgggggagccaacagcagcccccacctaccccccacccccagtgtggctgtctgcgagattgggcctcctctccctgcacctgccttgtccctggtgcagaggtgagcagaggagtccagggcgggagtgggggctgtgccgtgaactgcgtgccagtgtccccacgtatgtcggcacgtcccatgtgcatggaaatgtcctccaacaataaagagctcaagtggtcaccgtgcatgtcctggaaagcagggctggaaatgctggggccgaagcagtgggggatggaacagcggtgggtggtcagcgccagtgcgggctgttgaagggtccccctgctgtcccagttcactcagagttggcactggaaccccggaggatcccgaaggcagccagcctgtgcccatctgagcaggtcctggccaccttcccatcctggttctggcgggcagtccccctggacgctttggccaccagagggtcaccattcaccagcagagacgtgaggggcacagtggctaaggcggcatgaggcatcacagtcccctgaccgaccccatcagcactggattcacccgagggcgtcttctccctggaggccgtgaggacactggcacctggctcatcggcccgcccttcctctgagcctcctggcctccgtttcatctcagctccagccccctcgggcaatttacaggccacgtagcagattgaagcgggaagaaatgggcctgaacattgccgcgggtccaggcgacggaggagggcaggttgcccaacttctgcacaggacccggggtgcgccacacacacgccagtcctcgtgccacacagagaggtccggcctacgccagtcctcgtgccacacagagaggtccggcctacgccagtcctcgtgccacacagagaggtccggcctacgccagtcctcgtgccacacagagaggtccggcctacgccagtcctcgtgccacacagagaggtccggcctacgccagtcctcgtgccacacagagaggtccggcctacgccagtcctcgtgccacacagagaggtccagcctacgccagtcctcttgccacctcgtggtgggtgggcgccctgcttgccagccagggagcaccaggaaagagctgcctcctgcgtgctggacacaggaggtgcttcagggtggggtctcccattgtgtggggcccaacctgagtctaagggcccagggaccacacagcgggggtggagacaaattcagggtagaagctgtgaggggcctgtggtcagccccccggggggtccctgcagcaggcactgtgagacctactgaggtgtgtgcatgggctggggaaggagccagtcaggtgcccctgctctgaggagctgctgggaagtgctgctgggccctgggggaaggggtgctcacagcccctgcctgggccacgtgggctggagccgctcaggcagagccggactaattggggcaaatgaggggacaggaggcctctgaggaaaggtaaatagaattactcacccgccaggcactggggccctcctgggggggccctcaccctgccacccaccacagggcctgcatgcagcagggagggaagtgagctgattaggcaaggctggacccttctggggccctggggttgctgtgattgggacggcaaggccaggagacggtcccctgagctgcacctgctggaggcctgtgatctcagaccttaaggcttcaggccagctctacgcccctccggcctcaggtcctggctctcctctgagccctggatgcccgggtgcctgtgtgggcacgaggctgctccgagtcagcacacggaggtggacattctccttcatgccagctgagctcagggctggtgactgccctggggaaactgcccctcacctgggacctcctgacagccctccccattcccgagtccctctgcccttgtcctctttcacctctgtcccgccctcatccctaagggaactggagcaggctggtggagttgggtggagttggggactggcagggggtggactcacccaggcaataaacactggccctaaccaggcagtcctgcaggcaggtaggtggagggactgttttttttcttttttggagatagagtctcactctgttgcccaagttggagtgcagtggcatgatcttggctcactgcaaactccacctcccaggttcatgtgattctctgcctcagcctcctgagtagctgggattataggcgtgtgccacgacacctggctaatttttttttttttttttttgagacggagtttcactctcgttgcccaggctggagctcaatggcgcgatctcagctcaccgcaacctccgcctcccaggttcaagcgattctcctgccttagcctccctagtagctgggattacaggcaggtatgtgatgcccggcatcccaaaggggtatctgcaagagttgggtgctgtgtgtgcatggctgggaggaagatgactttgataccctggaatctggtgtctgtggacacaaaaatactactaaaatgagagtggagaccaggaaaaaggaagacatgaactacatgaaggaccaaatctaggagagtcagaagtgcgtcacaggaataggggaccttgagccagacagaaggctcagcagagacaccctcaaggggatgaaagggattgagtgcactaatatttagaggagagagttcaggacttgattagtgactagtacatagaaaactaaacaaatgaggctgggtgcagtggctcatgcctgtaatcccagcactttggggggccaaggcgggcgaatcacctgaggtcaggagttcgagaccagcctggccaacatggtgaaacctcgtctctactaaaaatacaaaaattagccgggcgtggtggcgggcgcctgtagtcccagctacttgggagcctgaggcaggagaatcgcttgaacctgggaggcggaggctgctgtgagccaagatggtgccattgcactccaccctgggtgacagagcaagactccgtctcaaaaaaaaaaaaaaagaaagaaaaaaccaagcaaatgaaaaaagaaggcaattaataattccaaagaaaagaaaaatttgggcagaaaagaacaaaacaagcagaatttaccatgactcagttctgaatacaaacacagacatcataatgtaaacaccaacactgatgcaaccagaatcatgggagaaaaaagatctagggagggtggtggacgggaatatcacgtatgtactgggggtaggggagagaacaaaatgggaaaaatcaagaataattcacgttagaaataaaaatacagagcaaaatttaaaaatgcaaagaatgaggtgaagagttcaaagtggtcacctcggggccgggcgcggtggctcacgcctgtgatcccagcactttgggaggctgaggcgggcggatcacaaggccaggagtttgagaccatcctggctaacaaggagaaaccccatctctactaaaaattagccaggcgtggtggtgggcgcctgtagtcccagctactcgggaggctgaggcaggagaatggcgtgaacccaggaggcgcagcttgcagtgagccgagatcgcgccactgcactccagcttgggcaacagagtgagactccgcctcaaacaaaacaaaacaaaacaaaaaaacaaagtggtcatctctaggcaaggtgggtgggagatggctagggctgcaggtccactacgtgagctggctcagcctatccccagacaccctgcactcactcagcccggggtcctccccctgcactcactcagccccgggtcctcccctgcactcactcagccccgggtcctccccctgcactcactcagccccgggtcctcccctgcctgctctttctctgaccctgccctccactgttcctttttcttctttctctccctgttgtgtccaggaaccaggcaccaccctcatttcttcttgatcaatctttaaaaaccagcagtgctcagctaactcttcatctatctcccccgacctggggctctgctgaatccacgctttagacccagctatcagctcggcatgtacagctggatgtccacaccgagctgctcaccctgtccccagcttcttcctcccactgtccactgcagaagcctcctaacaggacccctgctgctaccccggaccctgcaacccattcccacacagcagccagatgctttgacacccgaagtctcctatgaatccgatgaggcctctgcaccacacctcattttacagaagtacaggggaaacaggggtctgttgacaccacagagatgcagctggccaaaggcagaatgtggggtacacgactgtcaaacgccaggggtccttacacgaatggtggaaaaagaggggcatgttacggatggaggctcgggacacatgggcgccgccttcccatgctgccagcaacccaccaggaacctattaatttagtcatttgggaaatgggagctgggtatatcggctattaggaaattgttcatgctcaataagtattaattacaattttcataagagcttaacccccctgaaagaggtcactgtttcctcacttgtaaattgggatactaaaacctgccccatggagttgccagagtgacatgtgtgcgtgcacaccaacagtacacagcagatagtgacatatgtgtgcacgccaacactacacagcagatagtgacttgtgcgtgcgcgccaacactacacagcagatagtgacacgtgcgtgcacaccaacagtacccagcagatagtgacatatgcgtgcacgccaacactacacagcagatagtgacttgtgcgtgcacgccaacactacacagcagatagtgacatgtgcgtgcacgccaacactacacagcagatagtgacttgtgtgtgcacgccactacacagcatagtgacttgtgtgtgcacgccaacactacacggcagatagtgacttgtgtgtgcacgccaacactacacggcagatagtgacttgtgtgtgcacgccaacactacacggcagatagtgacttgtgtgtgcacgccaacactacacggcagatagtgacttgtgtgtgcacgccaacactacacggcagatagtgacttgtgtgtgcacgccaacactacacggcagatagtgacttgtgtgtgcacgccaacactacacggcagatagtgacttgtgtgtgcacgccaacactacacggcagatagtgacttgtgtgtgcacgccaacactacacggcagatagtgacttgtgtgtgcacgccaacactacacggcagatagtgacttgtgtgtgcacgccaacagtacacagcagatagtgacatatgtgtgcacgccaacactacacagcagatagtgatgtgtgtgcacaccaacactacacagcagatagtgacatgcgcgtgcacgccaacactacacagcaggtagtgacatgtgtgtgcacaccaacagtacacagcagatagtgacatgcgcgtgcacaccaacactacacagcagatagtgatgtgtgtgcacaccaacagtacacagcagattgtgatgtgtgtatgcacaccaacggtacaacacgcaacagttgcagttgcctcatttccccaagtcgccctcactgcagaaaggggagtgtctccagctgcttagtccagcagcctccaggattgggtgagggtcggagggccctggtgccctgcatggacaaggcagtggcagcagggctgaaggacaggctggggtgggaggaccgcaaccctctgggatcgggccccacggtcagctcccgcagcccaggggagaggtgcccactctagcagccctttatgtgctcctcaagctgaaagtagagaccccgctttgtgactacagtgagttctcacaccattaggcgaacggctggggtaagaccaccctgtggcccctgcagagctgacctcactgggtggtccaccgaagaggggatgggagggcaagtttgcttcagggtcagaggtccggtcccggtgggtgcacctccccagccctcaggtaggttaggccccctctcccgcgtcccctccccctcctcaccccaatcccctccccctcctcaccccaatccccatcccccacgcggtgcatcgggtgaaggggtggggcctccagcaacaccgtgggctcagcgctccccacagactcctaccctcctgcccagcatgtgcctggccaggccggccccctcctctgaagggttcttggcagaaagatctccaaattgaaggtttctggtggcaggcccaggtgctggggccatacctgggggagctccaccccccggctgtaggtaggcaaggcccggattccagggcccagtgtaagatgacccaggtgagcccaaatcaggtccatctcttaacacaaggagctccctcggcacctcctgtgtgctacacaggggtcccagcacccatgcaggggagaggcctttggatcaccacagcccacactctgtacagagggataaactactgctttgcctgtagagtagccattcttttatttatttttttctttttcttttttttttttttttttttgagacggagtcttgctctgttgcccaggacggagtgcagtggcgcaatctcagctcactgcaacctccgcctcccgggttcaagtgattctcctgcctcagcttcccgagtagctgggattataggtgcctgccaccacacccagctaatttttatgtttttagtagagacggggtttcaccgtgttagccaggatagtctcaatctcctgaccttgtgatccacccgcctcagcctcccaaagcgatggaatcacaggcgtgaaccaccgcacccggctctaacttttctatttttagtagaaatggggtttcaccatattggccaggttggtctcaaactcctgaccttgtgatccgcccgcctcagcctcccaaagtgctggaattacaggcgtgaaccaccgcacctggccccttttctttaataaatttgcttaaaaaaaaaaaagaacccaaaggctgggcacggtggcttacgcctgtaatcccagcactttgggaggccgaggagggtggatcacaaggtcaggagaatggctaacacggtgaaaccctgtctctactaaaaatacaaaaagtcagccgggcatggtggcgctcgcctgtagtctcagctactcgggaggttgaggcaggagaatcgcttgaacccaggaggtggaggttgcagtaagccaagctcacaccattgcactccagcctgggtgacagagcaagactccgtctcaaaaacaaacaaacaaacaaacaaaaacaccaaaaaccagaaaacccagaggggtaaattgaggcaggctggccgtgtgccaggccccagactgcagagcccagactccccaccgaaggctgagggtcgcgcttgctgtgtgaggctcagcaccttgtcaagtgcacccacacggtgactcgtgggggtagcagcaccaagcactgcgccacccatgatgtagtcatcaccacctgaagaaaccaaggctgactccaacctgctcacagccacggtgtagcaatggcctggccagggctcaagcccacccctcctcctcctgggaatctgggaaccccatgtttgagtgggccccccactgcaggacctctgctggcccttgcagctaccactgtacagaaggtgcacagggcagggccttgtccccaagaggctcggtgagtggaaggcacatggcatgaggaccgctgtgagccgcccgcccctcatccccgtggtggtgttccccaggctgcatcggctcaacagggggaggcagcctgggtcaccctagcctggtgggcactcgaaacgctcctcgaaggactcacaggccccatgggggccaggtaaggccgtgtgtttacagggagttggctcggggctgggtactgctgtgcacactggctgccaggcggcagctgggctggtttattactggaacaccctcccctgctcctcctccccggggaggccagccctgcgccagcatctcctgcaccagcccacccaccaggaggcgcctgtggggccactcttctgggaaagcgtgttcctggaataaattctggtttcgcttccaacaggaacaggaatagagctccctgtctggcctgccagggcagcttgcaggtttgaaggtcaagtgcacgtggctctctcctgggcccagcggcacccccttcttctggacaggggaggagccagctcctagaggggccacagtgccccagagggtgggttcagggtggtgcctactacctctgcggccccctgggcagcccctgtggcagaacaagggtagtgatatcaggcagcccagcctctccctccagaatgccctccctgccaccacctgccctaggagacctgagcacgcccagtggcttagactgagaatttctgggcttgagaagccttcgccatgatctggggtttccagccctgcccgggagctggctgtgcatgtgtgccgcaggggcagaggcctgacagaccaccaagaggccacgcccagtgccgccgcctttattcacagaccctcgagctccacagccacacagacacttagctttcagagggcacaggaaggaaaagggacctggtgaccctcccagcacaccccagagccaagacagacccagcagcagcacctcagggtcagcctgggtgcccctgcccaggggccactgtgaccgcagacaccaggaggccaggcctggttgctggggacccccttggggggcccggcagtatcctaggcccaaagagctggtgccatcttgaagctgattcagggaagaggccaggctggacggtaggggtaggtgtgagaagctccccagcgtgtccaggccacgggagcagcaagggtctgcggggagcccaggctggatggggtggggctgcccttgtcctgtatcctgaccacttcaaggacaaaaccagcccagtcccagcagcctgggaggcagcagaggctccttcttctcccctcctgatcctgcagtggccaggggcaggagggtgaggggagaggagagaggtcaggtcagggcccctgggggccaggcagcttcaaaaatgcagccaggtggctgggggagggcaggagggtgggcagggcccagacccccatgatgggggcagcctgagacccccaaggatgaaggaagggggcttgggaaggagaggcaggcctcagccgtcagtcacgccagtgctgggatctgcagcccgctggagcaaggcacccccatcccaggggcaggaccacaggacaggagggaaccgacacctcgcaccctgatcttccggaggccggggaggggcaccgggcgctctaggacttcttggcatcctgcgtgctccggcgcttcaggtcactcaggtcgatgggcttgaaggctgccaggggacaacgcggtaggtggtgggcacaggcccctcctgcccatgaggcccggcctgccggcccagccctgcccccaggtcagcccccactcactcttcaggctggggttagggaccttctccacatactcctccaccaggccccgctcgccacccggcacctggcctcgcaggtctcgctccacaccctgccaggctgcagaggcagagagtggtgtgctcagggccccctgccccagggggtggcatccacgtcacgagagtgcctgccctcagctcctgccctcccagatcctcttctccctcagaagtgtcctccatgctcccccacagccctctgcccaccccagcctcactcacctgcagaccccgtccccgctcctctggcaggcctgtcccttccccgcaagatgaccaggactgtggtcagagggacccctatgaccctaccccaggcttccctgcgcctcggaggcagcgcatcctcctcagctaggcctctatctttcccacctcatccacgcacctccccggccccagcacacggcacactcccctaatcccagacaaccacctcccggccacttctgcaacacgcccgttcatggctggatgcgtgcctgtctgtcttcaaaggcccctccctttccccagcaaactcctccagtgctgctagcatggatgactggctcccagtgcggcctctatctgtggcatggcccacccccagcccctcctcccgggctccccccatgatcagaaccaggtctcctctctacacaaggtcccctcggccacccctacccgcctgggccctgaaggctgtggacacagtgatggggctatctgtgccctggaggggcaggggcaggggccgcaggaggttcctcggagcgtgggtcctgggctgggggcagagctgactccgtcaaggacagggcaggagctgtgtgtggcaggcgcacccaccttcgtaaatgaagcggacgttctcctcgtgggctggggtgaagatctcgctgctgctgggtggggagcgggggctgctggtcctcttgccgttgtacacgactctggagacgggggagctgggggagcctggcgcatgagacagggcacacagcagggtgggagcccacaacccgccccggtggagaccagcccacctgcctgagacccacctggtcatcgcgggggcgtctgatcctagcgctccaccgccagatcccctcagcctctgaaacagaagccagcgcaggcatgggacgcagggccaccctctccagcacagaaggagggggaggcgcagggcacacctgcctcctcccttcagatgtgaacaaagtgcatggtccctctgcctaccagggtgtcccccacaggctggggtccagccacaggcagccagtgggctccaggcaaccctacgaggtagcagagagctggccagacgagccagacacacacacaacttgaagcgatcaagcccgctcagcggccttgatcctccacgtctcaggctcagacgtggaggcctcagccccagcaccgggagcactgtggccagagcccctccccacgtgggctggtggggccgtcagcatctctgatgtccagctgcctctcactgcagcagagggcctgcagcccctcagctaactgaccctgctctccctggtgcagggctgggcacacggcttctgctgagccttgatttcctttctgtaaaacggggatgagcttcctaaaggtgatcccagctccccggcacctacccaggtccagcttcctggttccctagagcatgagccacatcagtaccctggagatggaaccaaactccagctcccctggtgggcagagggggtggccctggaggaagctgctgggcctgacctggtgaccaagaccctgggctgccgcccgtttatggcctcccagcccaggggaatccacggctctggaaaaatggagtctattttgaggctcagacgctcacactggcaggctggacagtgtccccactccagctgaggacacacaaccccaaggtggggaagctgacagggctggtctccagcctgccctgctccagagggggcaactccaggttctgggggaggggagtcccaggattcccaggagggggctttgagcacaagcaactcccctgcccacccagaggcccaaggctgcagatactccagggcacacggctgcagccctcacagagggccaggagcactgaggcttcgagtcctctctggctcattccgcctcatgtcaatggtccagccctcaaacaccacgtgataagaatcccacggctcaagggcaaaaccagcaaagagcagaaaaccagctcccagccctggaactctgtgccccatcccaggccaggagtgaggtccaaaaagggccaggggctccccacccacggcagcacccagtttgctcacaaagtcacctctcctttcttggactctggggtctctctgcccagtcctcctgccagggactccagcccacgaacaccagagcacggagggaaaggcctgtttgggttgagggtcccacagggacatgctgcctgctgggaagctcccgttacagagaaaggcagagctcaggtaacaggtagactggccagccccctgcctcgccccctgctggctctcaccactgaccgactgctgctttaggggtacctgcctcccagcctgccctctcccgtggctcttctccccatgcatcctctgcctccagtggccacttggcctttatgcagccacacctttggcctgggatccccctgctgggttcggttgtcactcctgccccagatcccactgattgccccacatcctcccaagcaactacccttccggggctccctttgccttgtgtgcacacacacacacacacacacacctgcccacacatacctacctgcacacaccttagctgaatacatctgccacacacatgcatacaaccgcccgcacacacctgtctgtacacacctgcccacacacatgcggcacacacccatatgaacacacctggtgtggcagcatgcacttgtagtcccagctactcagaggctggggtgggaggactgcttgagcccaggaggtcaaggctgcagggagccaagatcgtggcactgcactccagcccaggcaacagagcaagaccctgtgtcaaaaaaaaaaaaaaagcccaggcacggtggctcacgcttgtaatcccaacactttgggaggcagaggcgggtggatcagctgaggtcaggagtttgagagcagcctggcgaacatggtgaaaccctgtctctactaaaaatacaaaattagttgggcgtggtggcaggcacccgtaatcccagctactcgggaggctgaaacaggagaatcgcttgaacccgggaggtggaggtgcagtgagccaagatcgcgccaacgcactccagcctgggcgacagagcaagactccatctcaaaaaaaaaaaaaaaaaaaaggccaggcgtggtggctcacgcctgtaatcccagcactttgggaggccgaggcgggtggatcacaaggtcaggagttcaagaccagcctggccaatatggtgaaaccctgtctctactaaaaatacaaaaattagctggatgtggtggtgggcacctgtggtcccagctactcaggaggctgaggcaggagaagtgcttgaacctgggaggcggaggttgcagtgagccgagatcgtgccactgcactccagcttgggcgacagagcaagactccgtctaaaagaaaaaaaaaaaaagccaggtacggttgctggcctattaaaataggcctgtaatcccaacactttgggaggctaaagagggcagatcacttgagcccaagagttcaaaaccagcctgggcaacatggcaaaatcccatttcttttatttatttatttatttatttatttgagatggagtctcgctctgctgcccaggctggagtgcagtggcgccatcttggctcactgcaagctccgcctcccgggttcacgccattctcccgcctcagcctcccaagtggctgggactacagaagcccgccaccacgcccagctaattttttgtattattagtagagacgggatttcgtcctgttagccaggatggtctcgatctcctgaccttgtgatccacccacctgggcctcccaaagtgctgggattacagtcgtgagccaccacgcccggccggcaaaatcccatttctacaaaaatataaaaactttggcaggagtgatggctgaggtggtaggattgcttgagcttgggaggtggaggctgtggtgagccatgatcataccactgcactccagcctgggtgacagagggagactctgtctctaagtaaataaatttaaaaccccataaatatatacacctattgtgcacccatacattttttttttttttttttttttgagatggagtctcgctctgtcgtccagggtggagtgcagtggcgcgatcttggctcactgcaagctccgcctcccgggttgacgccattctcctgcctcagcctctcgagtcgctgggactataggcgcccgccaccacgcccagctaattttttctatttttagtggagatggggtttcactgtgttagtcaggatggtctcgatctcctgacctcgtgatccatctgcttcggcctcccaaagtgctgagattacaggtgtgagctaccacacccagctgcacccatacagttttttaagtcaacaaggagtctcgtttgcctcctcttgttaggaaaagaaatgtacccacaccctcaataccacaggctgtgtcctctaagtcttcccagacacgaagagcccttcccacctctccctacttcttcctccagcttagggacccccagggcctcacactgcccccccaccccccgaccctgcacacatagccccaggctttcctggatgtgccagcagttccaagaggccaggggcctgctgtccccctggaagcacaataaacggttctgcagctcattcagcctcactgcctcctggggccctgccaaggagctgggtgcccaattctgacccagaaggaattttccattaaaaatcaagtatctgtgcacaacctatgacccagccattctgctcctaggtacacacacccaagatgcgtacaaggacagctggagaatttcactcgtaattacccaaagggaagagccaccgcagaagggtagcaatgcacacctggcctattcccataagggaatcagcagccagagggggcaccacagcccccacgcagagacggacaccaagcacaagagcaggacctgaggggccacagacaggccctgggacacatggaatgggaggaagctgcagagggccgaggcatggacataactggagccggggccaggacggtgcctgtgagggcaggaaggagccatccacggagagggctggaggtcaagcaagctctgaaccaagaggtcaccatggagccacaataaggcctccaacaacctcagcggggcggcctagcatagtgaggcacacagctgaggggggagggcaggaagtgtggctggcaggcagctcagccctagctcaggcctggtgggcagcaggctggtgtctggctaagcagagggaaccctgaggcacaacatccatgcatggggtccctgaggtggtggatgtggagggacccaggaccatagtgggtgagagtgagcaggggacaatggcacaggcccagagaagcgccgggggcagccggaaaagacccagcacacggcagacggccacctgaggtggcagcccctgagccagcaggagactgacacctcagctgcccaggtaaaggggagtggcggcctgaccgaggccgaccacaggtgaagggtgggagggaggggctccattcagcccagagagacagccccacttcagaggtctcgagaccccatccagcccggccccctgccttcatcccacctgggccaccaccagggtgacagcagtaagggagggtcaggcgatgcctcggtcccgttttccttccctctttctgtcagaatcaagaccgagcatgccgatgtcccggccacggccccgtactcctcagtcgctacaccacaccccactgcctctgagagttttctttcatagttttcatattttaacatctttgaaactgggctgcgcctgacaattgctaacacgtcagaatttaaccaatggtggtttttatttctcaatgtactgtaaaatatagcgcagctcacaatggctggggtctcacatgggaggaccctcgatgacactctcctggcccaggaccacccttccagagcccctcaggctacatggtctttaggtgttttctccccttcccctcaaagtcttccacatcccacgccaccccaccccacccagtgctgggacaacctccagttccagacacccagcatcaggacaggtggacacagatgtctacatgatcttcctgaaaccctatccccaagtcacttagcactagggtgtcacccaggccctctgctgccatcaagcccactgtccagtcccaacttgttttaccaggtgtcacctgctgctccactcctgccccaacagcctttgccacaggactacctgccaccagccacacagagcacaggccacctgcaagtctgtgcattctgcaggacgtgactgcctgcttccgtggccgtccagcctacagggcctggcctactgggctgcaggtattcccctgctctggggccccgggcaagctcctctgagcctcagcatcctcattcaaagtgatgcagcccacaggtaggctcgcctgctccaatagggacggaagcacagccatggaaagccagcagctcagtgaggtctctgtggctccttatccaatacgatgatggacaggacaagcatgtgctgtatggttcaactggatgctgttaagaatgaaaggggctggggccaggcgtggtggctcacgcctgtaatcccagcacgttgggaggctgaggtgggcagatcacctaaggtcaggagttcgagaccagcctggccagcatggtgaaaccccgtctctactaaaaatacaaaaagtagccaggcgtggtggcagtcgcctgtaatcccagctactcaggaggctgcggcaggagaatcgcttgaacccgggaggcagaggttgcagtgagccaagatcacgccattgcactccagcttgggggacaagagtgagacttcatctcaaaaaaagaaaaaagaaaggggctagatgtggtggtaatcctagcactttgggaggtcaggagttcaagactggcctgggcaacatagaaagagccccatctcgaccaggtgcggtgactcacgcctgtaatcctggcactctgggaggctgaggtgggcagatcataggaggtcaggagtttgagaccagcctgggcaacatggcaaaaccccattgctactaaaaaaaaaaaatacaaaaattaggccaggcgcagtggctcatgcctgtaatcccagcactttgggaggccaaggtggaaggatcatctgaggtcaggagttcgagaccagcctggccaacatacagtgaaaccccatctctactaaaaaaaaatacaaaaattagctgggcgtggtggcacatgcctgtagtcccagctacttgggaagctaaggcaggagaatcgcttgaacccaggaagcaaaggttacagtgagccgagattgtgccactgcactccagcctgggcaacagagcaagactctgtctctcaaaaaaaaaaaaaaaaattagccaggcatggtggtatgcacctgtaattccagcttctcaggagtctgaggcaggagaatcgctttatacccaggaggcgcaggttgcagtgagcagagaccatgtcactgcactccagcttgggaaacagagacagagcaagactctatctcaaaacaaacaacaaacaaacaaacaaaaaagggccccatctctgctctctgccctcaaaaaaaaaaaaaaaaaaaaagaacgaaagggatgctgttgattatcaagaatgaaacaactcttctgggtaaactggaatgtagagtcagcccactcttaggaaggtggaggcccagaaaagcactggggactgaaagaagagactgccaccagccacagcaaacacttgtcgggctaagggcagggcagccaccacgctgggcccttacacacattgcccacatccccacagctggaccagaaagataccctgagaacttccagttcagcgctgaaggagcctgccaccaagcagcggtgcccctcccagggcctccggggccacagcatttggggctcagcccgaatgctgcagctggcctgagcctcccaaagtctgcctccactctgcctgcaccctacagcaggtttctggactccctgaaagacccactccctactgatacccatgtggctttgctcagagactggccctccctccagatagggaggggagtcgcattgggtagaactatgtagaaccttcctcctccaggggacccaagggctttagagacttccaggtggggaggggacagaaccccagtctctggcctcccagtcccaaattctttcccccacacagccacatgcctaagaacaggccatgaggtaacactccagcaacgtgacaatagtgaggttccagagttagaatcagtgacgccatcgctagtcaccatgctcctccggagtttctgagattcaaagtttctaagactccactttctcttcgtgttctgtgtctttttcagccaacgaggctagaaaatgatctattgcccaagcaggcgcacgaggatacggctgtcacagctgccacactggcacctcgtggtcccttgaagaccgcccagggaaagcctctaagcgctgcaccacctcctcaccctctcccctgggtggtggcagcaacagcctgagcgtgtgcgccctcctccccatcctgatcccactcaaaccacaacctcccctgactcgccccaaatccagccctgttggctcttccttcacgtcccacttcccaccctctctacacgttctcgccacatcccacccaaagtccactcactggtccctgtttacacctcagggcctttggtcaagctgtcttctctgcccaaaactatcctactcatccttggggatccagctgaaagaccaccttcctgcgacggctacccaggggcaggagggagagaagcacagcccgtgccccgtatggctcccgcccccgcggtcacaaccaccgcccagtgagtgcctagaaggcaggcggaggccccgttctccccgttaggcccagcatcaccgcccggggagacgggaaagagggcaaggccgaaaaatggacagaaaaagaatgcggacggccgggcccgcggcgctccgagaatcggaggcatcctcaggcacggtccctccaggagaccgggaaagcggggctctgtcagccccaaagccccgacggcggcagaaggctggcccgctgcgagcgtccggcggcgctgggtccccggcacctgcccctgcctgggcgggaaaggcgctcagtccgagccgcgccctccccacgcgcgctcccaggcgccccgcgggccgcgccctcctgcaggtgccgggcggggaacgcgggcccctccctcggaccccggctgcccggccactcccccgcgcccggccccgcccggccctgcagggcacccgcggccgcgcggcgacaccagggcggggcccagccgcgcccgccccgccccgccccgtccccgccgcccggcgccgcacccgcctcacctcgccccgacccgccgccaccgcctcttccagctgggaggccccgccggaagtgacgccaccgcgggctgcacaggcgcaggcgcagcgcgctctcacgtgaccgcccggctggcggagggcgggggcggccgggattcccgtgcggggttggggctcgtggcggaagctccggacctccctggcccgaacggtgagcgccgccggccactgggagcggccagagcccagtaatcaggacaccaccacagggaccacgtgtgtagacccaggccccctcacctgggagtcacgtttattgaaaaagtaaaaagtgtcacagtaaaaaattcacctggggacaaagccaggcctaggaggggtggcggggtcgtggagggacgggtccggccgcccctggcccacgggtggggcacgtgctggcccatgggcgacgcgcggcttctccagggaggcggccctgggcgcgggggcgggcgggcaaagctggctcagtccatcgtggtccctttgaagagctccaccagctccttgtagtccgggtcgatgaggtcggagggcaggtcgccatcgtcgttggttgcatccctgtccgctcccagggagataaggtacctggggtgtaaaggtcgctctggctgaagcggggaggagccaggagagtgctcgccccaacccgggtcagagggccagagtcctggggtcacctgtgtgtcccccaccttggggtcctaaggtccgggtagggtgaggaggaagaaacctgaccctttggaagctgtggccagcttttcaagttggttctattgaggacaaaggcagaaacaggattccagaagcctctagggtttgcagggttctttttttgttttttttgttttttgagacagaatttcgctcttatcacccaggctggagtgcaatggcatgatctcgactcacggcaacctccacttcccgggttcaagtgattctcctgcctcagccttgagtagctgggattacaggcgcgcgccaccacgcgtggctaattttgtatttttagtagtgagagggttcttgtcacgaactcctgacctcaggtgatccgcccacctcggcctcccaaagtgctgggattacaggcgcaggcgtgagccaccgcccccagcctctagggttcttgccgacaccacccgggctacattttggggctcccatcctggggacccactgaggcccggaggggtcgggttcaagcctgtgtagacccagggccccctcacctggctatgtcagggtacccatcgctgcaggcaatgtgcaggggtgtccagcccgcctcatctcgctggtgaatgtcagccccgtatttgaccagcagcttcacgcattccaggtttccagagagcacggcttcatgcaaggcggccaggcctgggcagggaggacgggaggggtcaagactgagccccaggtcaggtcctccttgctggcctctcccaccaccccacaggccctggccagctcttccaggctttgctcacctgaggggtggatggtggccagggagactttccgagtccggatgaagcgccccacctgctccaggtcaccctgccggatgtggtccaagaacaggacatcattagggaaacgcacgctgcgatcagccagcatccgccgccgccgctgccgtgggctgtagcgggcatagcgggcagttctgctaggcatcttgggcgctgtggggcaggttgcccctggggaccctactgcactggggttaataatgtatccggtcccgaccagatcagcttgagggctcctgtcggacgagccccggcctctgacttgcttatatagggctcaggggctatataaagctgcacggtcatcctccccggcgcgaggggctgaaactgagctgcacccccgccccgcaccccagatcatgtttagtgactcatctttcagcccatctgtcaccgtgcccggccaaaggggtcagatcattcctgcctgtcgctccctgccccacagctggacctagaaggtgccttaccgagggcaggaggaggcaccggtgcagaacccatgagatagctaggaacgcgagatcaagggcacagtaggtaccaaggtcattggaagggcttttgctctctacctcctggaaagtgaggggcggccaccccctccacatctgcagaagcacaggtccaccgtgctgtggtgaaacaggccttagcccctccatctccctacctgtcagttttcaccttccagcgtggcttgcctcactctcagtggttttcccaaaactactctgatggcctaggcaggcggatcatgaggtcaggagatcgagaccatcctggctaacacggtgaaaccccgtctctactaaatatacaaaaaattagccgggcgtgatggcgggcgcctatagtcccagctacttgggaggctggggcaggagaatggcgtgaacccgggaggcggaggttgcagtgagccgagatcgtgccactgcactccagcctgggcgacagagcaagactctgtctcaaaaaaaaaaaaaaaaaaaaaaaaaatgactctgatggtgctgcttcctgctcagaaaccccgcaggcatccttggctgggatctcagtgcctcaggctcctgctcagtcagtcctgcgacttttcctccacgtgcctggctcccctgcctcacacacctgcaggggacagggtattccctacacactcatgggttcaccctgcatagtgtctctgcattccaggtttgacacacatactcacacttaaggtggtgtccagtttgctctccacgttcagggaccatcacaccctgggtggtgtgctctctctgccccggcccctgtgatcttacctctagaagcacagccaagggaatttttttgtttgtttgtttgagtcagagtctcactctgtcgcccaagctggactacattggcgcaacctcggttcactgcaacctctgcgtcccgggttcaagtaattattttgcctcaccttctcgagtagctgggactacaggggcatgcaccaccacgtctggctaatttttgtatttttagtagagacggggtttcaccatattggccaggctggtctcaaactcctggccttgtgatccgcccgcctcggcctcccaaagtgctgggattacagacgtgagccactgcgcccagccaagggaatttttaaaactcgtgttccaacaggctcttcattgctggctgcctttacttttgcaacagccccagtggaggtccaaagtagggcttggactacaggacatgagcaagtggatgggatgggacacagacacagagttgaccagggaggtctttgttgtcagggacagcgatcgattgtgctaggagcactgcagcacttgaagctggatggatgagtctgccggggctgtcttcacagaccacagactgagtggcttaaaaaacagatggttggccaggcgtggtggctcaaccctgtaatcccagcactttgggaggccgaggcaggtggatcacctgaggtcaggtgttcgagaccagcctgaccaacaaggtgaaaccccttctctactaaaaaatacaaaaattaggccgggcacggtggctcatgcctgtaatcccagcactttgagaagccgaggcgggtggatcacgaggtcaggagattgagaccatcctggctaacacagtgaaaccccgtctctactaaaaatacaaaaaaaaaaaaaaaaaattagccgggcgtggtggcgggcgcctgtagtcccagctactcaggaggctgaagcaggagaatggcgtgaacccgggaggtggagcttgcagtgagccgagatcgtgccactgcactccagcctgggtgacagagcaagactccatctcaaaaaaaaaggccaagcgcgttggcttacgcctgtaatcccaacactttgggaggccaaggcaggtggatcacgaggtcaggagatcgagaccatctggctaacacggtgaaaccccatctctactaaaaaatacaaaaaattttctgggcatggtggcaggcgcctatagtcccagctacttgggaggctgaggcaggagaatggcgtgaacctgggaggcagagcttgcagtgagccaagatcgcgccactgcactccagcctgggcgacagagcgagactctgtctcgggaaaaaaaaatacaaaaattagctgggtgtggtggcaggcgcctctagtcccagctactcgggaggctgaggcaggagaattgcttgaacccaggaggtggaggttgcagtgaactgacatcacaccactgcactacagcctggggatggagcaagactccgtctcaaaaaaaaaaaaaaaaaaaagacggtccgtcccagagctctggaggctgaaatctgggatccgggtttcagcagggcaggttcctcctgaggctctgaggagcgtctgtcgcaagcctctccccagcttctggtgccgccagcaatcctggtgtccttggccctagcagcatcgccacgatctcggccttcatctccatggtgttctcccagcctttgtcactgttcacatcacccccttgtataaggacaccagttatagttgggtattgcctcatcttaaccagtgacatctgcaagcatcctgtttccaaacaacggtcacattctgaggtcttgagggctaggacttcaacgttaattaaggagacacatgagtcaacccataatgctggtaaaaccctgcaggtggtcactaaaggcctgaatgaggacagaaccaagactggccagcagctctttgcaggggcagaggagagctgggccaccaacagcctcgcatcattaggctgatctgcatccaacgaaatcaaatcagcaaacatattagacacctctaggtgcaaagccttggccaaatgctatgggagggctgggcacagtggctcatgcctgtaatcccagcactttgggaagccaaggctggagggtcagttgaagcgaggggtttaagcagcctgggcaacatagtgagactcctttgctttaaaaaaatttaaaactggccgggtgcagtggctcacacctgtaatcccagcactttgggaggccgaggagggtggatcacgtgaggccaggagttcgagatcagtctggacaacatggagaaaccccccgtctctgctaaaaatacaaaaattagccggatgtggcggcgtgcgcctgtaatcccagctactcaggaggctgaggcagtagaatctcttgaacccgggaggcggaggttgcagtgagccaagatcgcgcgactgcactccagcctgggcgacagagcaagactccatcttaaaaataataataataaaaaatttaaaaaataaaataaaaagagtaaaaggaaaaatgctgctggagaagcggcgctgacggagggtccctgcctggcgaaatttcctggacctgcgttggtacccaggtgcaccccctgtcccctcccctgccccctgggcccctcgcctcgggtacaccacctctccagtcacacactggagtggccctggagcctctagccaggcccgggcctgcagacaccctgaggggggtcggctcccagcgtggctgcatttctagggactcagggaaaggtatggacagttggaattccaggtcacttgggaggagccaggccgttttttctggcttgtttacgtgaagcctggagacgaaacgttgtacactggagacaggctctcctctgatgtgaagattgccttttctcatgttgtggaaagttctgtctgccctcccccctcagaggatcagatgaaagcacgctggatgaagctgccaccaacagtgtgacgagaaggaacgccctttccaggagtgaccgggcctcaggctagagacgcggtgggggcaagaccacccggtgagcctgtttggcgaccccaagcaagcccctgtgtccctcctgctggaggtgagctgggagcgtgcagagcttttggctttggggtttctatctggatcacccgagggactggtgcctgaagcctcgccagtcacaacagatttccttgaaaggtatttatgtgccttctattctaataaggatgtgggaaccgtgtgttctacgccatgatagacactccctggagctcctcacccttgaaacgttccatcagaagccggccgtcagcagtcgtgcctgctccaccgtgggcgaagcgtgctgttcatgcagcgtgacgtcagagccaaacctgtcttcatggagttttgtccctgattcttcttggtccatatgaacttgcaaattgacctagtttgcatgactctaagtttctgccttctggaggacgaactagaacatctgatgcacaaggtttaccatcacactttttttatttttttttgagacggagtctcgctccgtcgcccaggctggactgcagtggtgcgatctgggctcacggcaagcttcgcctcccgggttcacgccattctcccgcctcagcctccggggtagctgggactacaggcgcccgccaccacgtccagctaattttttgtatttttagtagagacggggtttcactgtgttagccaggatggtctctatctcctgaccccgtgatccgcccgcgtcggcctcccagagtgctgggattacaggcgtgagccaccgcgcccggcctaccgtccaacttttagaagtccagtgaggcctggctgggctcagaagctcacgcctgtaatcccagcactttgggaggccaaggtagaaggatcacttgaagccaggagttgaagaccagcctgggcaacatagggagacccccttcccttcaaaaaatttaaaaattagccaggcatggtactgggtgcctatggtcccagctacttagaatgctgaggtgcaaaagattgcttgagcccaggagtttgaggctgcagtgagctacagtcacaccactgcaccccagcctgggcaacagagcaagaccctgtctcaaaaaaaaaaaaatgtccagtgaatgcaaccagcagtgctctgcaaaagcacccgggagaccctgttagtaaagtcagctgaggccaggcgcagtggctcacgcctgtaatcccagtactctgggaggccaaggtgggtggatcacccgagatcaggagttcgagaccagcctggccaacatggtgaaaccccatctctactgaaaatacaaagattagccgggcatggtggtgcatgcttgtaatcgcagctactcaggaggctgaggcaggagaatcacctgagcccaggaggcagaggttgcagggagctgagatcgcagcgctgactccagcctgggcaacagagtgagactatgtctcaaaaaaaaaaaaggaaaagtcagcgcaggtcgcactgcagtctggcaggagggccagcctagggccagaagggcccttccctccctgaggtcagaggccccccggggtgtggtacatagacccagcaatcactgttttaggctccaggccggtggcttcctggcacctggagagacagagggttgggaagtcccaggctgctaagccctaaccacctcctcccagagccttcaaagtctccccactaatccagcagcccagtcagagaggttttggacactgccccaccacctcccagccacagccgagcccaggaatgtgctcatcagctgcctctgcaaaacgggaaaggtatcagtgactccctcccctttccagagcacatgacaccagtgctgcgggcagctgtgccatgtcccaacgttctctccagagggccggctccccgcacagctggtccacagggtcactgcaccccatcccacggccagggagcacaggcacaaatacagcccacccctttagctgtgactcaggacagcctccctcagagaccctgcaaggagccacagccctcgggcctctgcccacatcctcccacggcacctccagatgccgttgcccacttttccgtgagtacgcggctcactgtgtcgcaggacccaggcatggcacacaaaccctgctgaggccctggagctgaactagccagaaaccagccccagcacgggctgtctccaagacccacagagctgggggccggggcagacggcagcacccagactgccgagctggtgtgagccgtgtggggccaaggacatgtgggcaaaccgggctggctggtgctggcgacgtgttgacacaggtcctcgcggcatgctggccggatactccacagcctggagcagaggcaggaggagccggagcggccgagtttgtgagggcctgtggggccggcaagggaggtagcggggagaacgggagaaccgcacccccggcgaggcctggtctggcttgagagccgtctctggctccagcagctgcagccagcccgcaagctcgggaactgggaggacacccgggaatctcggcagtgcggaagctcctactctaggaagcacatcaggatgtgaagttggcggggctcacagagtcacaggcagggctcctcaaggcagcctggtgagggtcgtttgttccatccgaacttctgagggccgagcagcctccctagagctgcagctccacccccactcccacctgccacctgcacccttgggctccttcctcctgcctcaccgccctctgagaccaccatgagccctgctggatcctcagggcctctgccgttgccctcagggggacccacagacaccacagagctcctgttgcctcccctgcagaaaagcagcaaatccaggctcagcagagccatcgcccagccctgcacacaggccgcggcttgccgtctgcagaaaaattgactttcagccgggcgcggtggctcacgcctataatcccagcactttgggaggccgacgcgggcaaatcacgaggtcagccagcagatcctggctaacacagtgaaaccccatctctactaaaagtacaaaaaattagccgggcgtggtggcggatgtctgtaatcccagctactcaggaggctcaggcaggagaatcacttgaacccgggaggcggaggttgcagtgagccaagacagcaccattgcactccagcctgggccacagagcaagactccgtctcaaaaaaaatcgagtgtatgtgttttttctgcatgtgaagcacaggagtgctgaggttaagccaaattacaacttaaagaccaggagatccttatttttagagacagctctgtcacccagctggagtgcagtggcgcgatctccgctcactgcagtgttgacctcctgggatcaagtgatcctcctgcctcagcctcccgagtagctgggactgtaggtgcaaaccatgcccagctaatttctaatttttcctagagacggggtctccccgtgttgccccagcactgggattccaggcgcgcgtccctgcgcccagccctgccctttatcgtgtgaagggttagtgataagcagggccccctgttcctctcacccatccttgaagcctgagtccacctgatttctcgtcactccacggcggggatgggagggaatgaccaggagtctgagcatcacatggggctgggtggctccacccgtgtccacatccagggtccagaatcacagaagccccatcagagtccaggtaaagcagcctacaggcagggaaggcatcctccccgggaatcgcaagcctgcacagctctgctggggagactggggcctgtttctgcatctgcacctcgtcccaggggcgaggcctctcagcaccagtaaccccactaaggcctggcagatggccttggcgtccgcattccagcccagctctccgggcttggtgagatcataaacccgaggcaaggacaggtggtaaaatttcaactttatttggccaatgtgttcaattcgattgtgaaatagaaatgcctgaagaactgtcagcgtctgattcagctccagcatccttggccacctccccacccgggagtcaagggtcgtggttctgccttgaacaggccacaggccgtgctgtagagaggccagtggtcacaatgagcccacgacaggaggaggagccctggcttgagggaaggggaaggcccaggcctgtgccgggccccagggctggcagccaccagctcctcttccaggcatgggggacaccctgacaggatccggaagtctccatttacccaaaaatgcaagagccatgatcagtcatggcgacactgcaggcggtactgagtgaccatgtccagtccggctccgtccctcccacacgggggacaagcttctccgaggaggcctggccaaggtggaacaaataccctgatgtcgaaaaatgtctaaaaatcccacagacggaattttcaaaaagaggagaaacctcccgcgggagggaggcagcgagactccgaacacggtagcaagcactctggacagactcatgtatgaaaaagtacatcatggtttcaggaaacaagccccaccagggtgggctgcctggagatggatccctttccaaaaaccgaaaagcagaaggaagagacgggggtgaacggacggtgtgtaggggtgaggtgtcacttcagagaggttccctgggtttccggcgacgccctccttcaagcgaggccgcaggcttcggaggcgtgcgctgctgctgggtgtgcagcccccgaggggtctcggcagcgcccgggtctggctttgcgtattacagttcatctttcacagctttctgatcatcgtcttcctccatgtctggctcctctgcttcttccaggtcctcgagatcctgggatacaggaaaaggggcggggcgggcaggttggctgcaacagctgaggctgccggcccccagcaccccacactgctcacaccggggactagccggccacggcggacatggccaccggccactggagcagccaaccctggtctttacgagctacacaggggtcttcccaggaagagtgacgcctgggggatttctgcctatagcaggatgaatcagagcccccactgtgtcaggaaccctgggaatcccagctcagccttggacccttccactgggcatggaaggcgtatgtgtgtctcccagcttggcaccatggagtctacagagggtccacatctcggcagggacaacagccccagcatgaagtccaggcacagtcaccactggggtgtgaccattctacttccaacccttgggctctggccaatgacaggccacaggcagcaccaggggccggccctccatccccagcctgggcagagtattcccacctcccactgtgcaccagcactcccagcaggccctgccagcctgggctgaccatgccctcatctccttcaccatggtcaagcaccccgcccctgccgcatcctcccaacaccagccttcctgcttccccggcagagtcaccactgctgctggccacgcgctgacgggcaggactaaactcccgagggcagacccatgtctgcgcccttgtgcccgggccccgccagcgggctggggatggacctctgagtccaagttagcagcatgtgaggaaccggtgccatgtgtctgaaaaggttttctaagcaaaatctggtttttaaagatgccttcaacgtcgtcccctaaagaagtgctggccagggagagctgtttcagcagagcactgggagcacatcccttgccctgctgggcgaaggtgtggggccccagagccctggacgcacagacgtgcctccaatggcaccattcccatcacaagccgagcccaagtgggcatgtcccgtggggccaaggggctgaatcccagagaccagcccagggctgtgaccccactcacgtcatcatcccctgccccatcctggccaccgctctccaggaatttcttaaaaccatccagcgtgcgttccccgttgtaatcaatgacctgtggaagacagggatgagtgcaggggctggtcccggcccagagccaatctcctggcattggctcctcctccctagagaaaggcagagcaggcccggtccggtggctcacacccggaatccagcacattgggagttcaaaaacagcctaggcaatatagtgagatcccatctctctcgaaaaacaaaggtgggtgcttctgaaggagctcccacagctcttctcccacctgactagccccaggctccttccagagaggcacccaggctggcgtggggaccactgctcttcccagagcccgccccagccccgtctggagggaaggcgcaccgtcctgtcggcactggcaggaaagaacttgagtgtggggaagctgtgcactttgacggcctccacctcgttggcagtcgagtccatcttggcgatgacgatgttctcatggtccttgtacgtctctcccagtttatcccaaatgggagccaactgtttgcagtgaccacaccatggggcatctgaaaagaaagcagttctagggtgtgtcctggacacaaagccactggcagacgcttccccaggagtctgcctaccttgcgcgtgccctggtggcacggacctggggagctgaaagggcaacacttacagaactccacaaagacgttttttttctcatcaaaagccacgtcttcaaagttcttcccaacaagcaccttgacaggctgcttgtcccagtcctccggcagctcctggctcatcaggtggggctggagggcaggcagggcacggtgaggggcggcgatgcctgggggaccacagagctccccaaccctcaccctgcccgggactgaggtgcgtggctgccctgggcacaccagggtggcagccgcagacaccaacagtgccaagaatccagaaagagaaggctgggccagtgggctgggcccaatgagcccacgcaggccgcaccctcgccggccaggaggtttccctgaggagcatctgggccagccgtgtggacaagagggctcctacaggtccccaaaggtgtgacaagaatggtggtcttcacaccatcttgggctccgtcctcttactctgaagatcttactttgaggacgaagcccaggacactgagagcccagagaccccaaggtggcggctctacccgggaggcagccctggcccggggacgcgcctgcaccttgattttgccctccaggaagcggtggcagaactctgtgatcctctctgccgtcagctcctccgattcgggcttgtacttggtcatctcctcctccagggtgatgaggcgcacggccgggcactcttccttcttcaggccaaagaactcgaggatgcgctggttgtcggtgtggtcgctgtcgatgaagatgaacaggatctgggggagaaaaggaggttgcacaggtgcgggagacggctggcctctgcctccagccctgactttgctcggaagcagaccgtgctccggtgcctttttcctccaacctggattccggggttgcccaaccagaccagcaggtgactgggagcagaggtctggcctggctggcccctcgcctacatccaggctgtcctgaatcaggtgcccgatccagtccagcaggcagcctcaggaaggccccacacttgtcacctcgggaagagttgtactgctccctggcaccgccccacgagccacccagaagagcagctcaccttgcccttgaagctctcggctgctgttttgaagttgctcagtttgccgtcatagtcagacacactcttgggcaagaacagcaggatgtgagtcttgatttcacctccaaaaatcttcggggctgtctgtgttataaacttaagttactgggtctgagtcacacactattaatgcagaagattctcccaatggcctccaatgtcagacgctggacagcagtggtgaccgggagcctcatgccacccccaacccactcctccccatccccagcctgggggctgcagggcagccgcacctgctcggtgaactcgatgacaaggggcagctggttgtgtttgataaagtccagcaggttctccttggtgacctccccttcaaagttgttccggccttcatcaaactgtggacagaaagagggccctgactgagcattgctgctgggagcacagcccctgggcccgggtctccctggacgtgggaagtcacagcagccagcagccctgccctcccgtggggtttcgagccacaggtccagcaatgggtacaggacatggctgttcctcgacagtaagactggctctggtcacggccttatggctgcccgtgaattcaacagctggcttcacatccacaatgcaagcctggcgcacgtggtcctccagcaaccttgaagtgtggcccatccccagggcccctagccttttcagggcacccatgtggtcaaagctattttcttttttatttgtttttgagacagtctcgctctgttgcccaggctggagtgcagtggcatgatcttggctcactgcaacctctgcctcccaggttcaagtgattttcctgccttagcctcccgagtagctaggactacaggcgcctgccaccatgcctggctaatttttttttgtatttttagtcgagatggggtattaccatgttggccacgaaggtcttgatctttttttttttttttttgtgatggagtcttgctgtgtctcccaggctggagtgcagtggcgtgatctccactcactgcaagctccgcctcccggattcaagccattctcctgcctcagcctcccaagtagctgggactataggcgcccgccaccaccggctaatttttggtatttttagtagagatgggtttcaccacgttagccaggatggtctcaatctccttacctcgtgatctgcccgcctcggcctcccaaagtgctgggattataggcgtgagccaccgcgcccggctggtcaaagctattttcacactcacacttctctggcctctgccttttcactctccctctcacgtgctgcggcacagacccacagaggctgctgggcgcatggtgtcgcaagagcaggagggcaggagaggagaatcctgctggaggaatctaaaacatcactcagcactaaattgtttttgtctgggacaaactagtttccgtaaagatgtgatttatgataacatgtaatgggattattattcttttaaaataaatttggctacagtggctcaggcctgtaagcccagcactttgggaggccaagatgggtggatcgcttgagaccaggagttcgagaccagcctggccaacacggtaaaaccccatctctactaaaaatacaaaaataagctgggcgtggtggcgggcacctgtaatcccaggtacttgggaggctgaggcaggagaatcgcttggacccgggaggcggaggttgcggtgagccgagatcgcaccactgcactccagcctgggcgacaagagcgaaactctgtctcaaaaaaaaaaaaaaaaaaaaaaaaaaggccaggtgcagtggctcacacctgtaatcctagcagtttgggaggctgaggcaggtggatcacttgagttcacgagtttgggaccagcctggccaacatggtgaaacctcgactctaccaaaaatacaaaaatttagctgggtgtggtggtgcacacctgtaatcccagctgctcgggagactgaggcagaagaaacacttgaacccgggaggcagaggttgcagtgagccaagatcgtgccactgcactccagcctgggcaacagagcaagactctgtctcaaaaaaaaaaaaaaatacaaaaatacaaaaatcagttgggtatggtggcacctgcctgtaatcccagctacttgggaggctgaggcaggaggattgcttgagtctgggaggtagacattgcagtgagatcgcaccactgcactccagcctgggtgacgagtgaaacaggccaggcgtggtggctcacgcctgtaatcctagtactttgggaggctgaggcgggcggatcacctgaagccaggagtttcagagcagcctaatccaacatggtaaaacgtcgtctttactagaaatacaaaaattagctgggcgtggtggcgggtgcctgtaatcccaactacttgggaggctgaggcaggagaatcgcttgaacccaggaggcggaggttgcagtgagcccagatcgtgccactgcattcgagcctggcaacagagcaagacttcatctcaaaaaataaaaaataaaaataaatagagagaaaaaaacgattttttacattcttagttctagtttctaatacaacagatcctgaaaggcgcaatccacgtgcctgtaaggccctggggacccctaataatgcacggcagcttcagggagtcctaaggccacaagatggagaggctgtggcgccccaaccacgaggggtcagcctgcagctgaggatgcggcctcggctcaggctcagagaggcgcccctgtgctgaggctcttcaagtgagaattttgggtgagccttccatcattcccccgaactacttttttatttatttttaaaatttatttatttttttattttttgagacggagttttgctattgtcacccaggctggagtgcaatggcatgatctcggctcactgcaacctccacctcccgagttccagcaattctctttcctcagcctcccgagtagctgggatcacaggcacccgccaccacgcctggctaatttttgtatttttagtagagacagggttttaccatgttggccaggctggtcttgaactcctgaccccaggtgatccacttgcctcggcctcctaaagtgctgggattataagtgtgagccactgagcccggcccaaactattttattttttttttgagacggagtttcactcttgttgcccaggctagagtgcagtggcaggatcttggctcactgcaacctctgcctcccgggttaaagcaattctcctgcctctgcctcccaagtagctgggattacaggtacgcgccaccacgcctggctaattttgtttttttagtagagatggagtttctttctccatgttggtcaggctggtcttgaactcccgacctcaggtgatcggcctgcttcggcctcccaaagtgctggaattacaggtgtgagccactgcacctggacagaactactttttaaaatacttatttatttaatttattttattttattttatctattttgagactgagttttgctcttgtttccctggctagagtgcaatggcacgatctcgatcttgcctcattgcaatctccgcctcttgggttcaagtaattctcctgcctcagcctcgcaagtagctgggattataggcatgtgccaacacgcctggcaaattttgtatttttattagagatggggtttctccatgttggtcaggctggtctcaagctcctgacttcaggtgatctgcccgccttggcctcccaaagtgctgagattacaggcgtgagccagcgtgtccagccaaaaaaatttattttatttttactttttgtagagacagtcttactatgttgcccaggctggtctcagactcctggcctcaagcaatcctcttgtcctggcctccctaagtgctgggatcacaggtgtgagccaccaagcctggtccccttgaaccttttttttttttgagacagagtcttgctctgtcgcctacgctggagtgcagtggtgcttctcggctcactgcaagctccgcctcctgagttcacgccattctcctgcctcagcctcctgagtagctgggactacaggtgcccgccaccacgcccggctaattttttgtatttttagtagagacggggtttcaccgtgttagccaggatggtctcgatctcctgacctcgtgacccgcccacctcagcctcccaaagtgctgggattacaggcatgagcccctgcacccggcctcctcaaacttcttaaatgagacttggggaaataaatcacgcatcctttcttactggccgtttccatgtatgcgtctgcagagtaacttagagaccaggtgccactccctgctcttgtgcacgctgtgcctgggccaccctggcctggcctgactgccaaggagctgatgttaaaccagggcacaagcaccaaccaccctgcccgaacccgaggggcagaggcttctaagcctgctacctcttccccagaggggcaaaggcgggtaaggagaggcagaaaagccaagttcaggaggcccttggagggaatcctttggaacatgagctgctgatcacagccgtgctcccagtggcacgggtgggctcgcactgtgcccaggagtaacgccgggccgcaactgcaggcaaacgaaatccccccacccctgcagaacaatgtctctgactccctccagagtgtcaggcgccgcctacaccatctcatgccaagaagccaggaggagacactgccgcagctgtcccagggctgccatcgtttcagcagagatgctacaccacactcaatcacggtctactgcggtaagggaaactggtccacttagcagggcacagcagcaggaggccagccctgccaggccacggtgacaaacagcatagaaacgcccaatgcaggccgggtggtatggctcacgcctgtaaccccaatgttttggcaggctgaggcaggaggattgcttgagctcagaagttcgagaccagcctgggcaacacggtgaaaccccatttccacagaagtattaaaaaatagccaggtgcggtggtgcacacctgtggtcccagctactcagcaggctggggtgggaggactgcttgagcccaggaggtcgaagctgcagtgaagtgtgattgtgccaccgcactccagcctggtaacagagcgagaccctttctcaaacaacaataacaggcccagtgctgccagctgggggagaagaaaaagtgaaatatcagaagctctcacacccatggtgccagtgaccagcagcccccgcagaggttttcctgggttgcagtgcctgctagggaaggaagggaagagcaggcaagagcgggccacacaagagcacccgactcagccaggctgcccactgtggccactgcacacacaggaaggcctcactcactttgagggatgggggttaacagcctggtggaaaaggaacaagttggactcatcctctcagctgcggggtgagctctgacttccagggcagcccctaccacgtgcaccggacagggggccgggcttctgcccggagctgcctgcaacgaccacgttcgccatcacagacacctgagccaccttcagtgggcaggaaagcgccacccaccaactggcatcaaacccaagtgggtttgtctgtgcccagctctagtggactccagagaatggagacagaacgttaacctgtggggagcccacatggatggccacgtgtgagcctttgcaggcaagagcaacgaaaccaccctcccagccttcgcggacacatatcaccaaactgtccatagagtcacagcggccactgcagacatccagggcactgaaggagctgtgggctgtgtgacaacacagggttcgcgagtttcgtgggctctggagaaagtctgccccagaacccaagtttcaggacaagacttggaactttctctttaataaaagctctaaaaagacctttggttccttcaactttatccaacacttcactggctttttctagtcagaggtttaatttcctgggcaccttgcaatggcaatagactaatttagcaactctcttcccttcaggggacatcaagagaatgtctcctggtaaagagcatctactgtcttgagttatcttgaggaagtggctgcaaaaacagctaaatgacaagaacaagaacatggaagcaagccatcctgacccacccgcaccaccgcgctccaggaagctggctctaccctccctcctacctggtcccggggagtgctggatgctccgtgcttactacagaaagtgaatgggtcggtggctcacacctgtaatcccagcactttgggaggccaaggcaggcggatcatgaagtcaggagttcgagaccaccctggctaacacggtgaaaccccgtctctactaaaaatacaaaaaaattagctgggtgtggtggcgggtgccctgtagtcccagctactcgggaggctgaggcaggagaatggcgtgaacccgtgaggcggagcttgcagtgagctgagatcgcgccactgcactccagcctgggcgacagagacagactctgtctcaaaaaaagaaaaagaaaaaaaaaaagaaagtgaatgggttccttgtgtccaaaaccactcagccccaatcccagaggctgcccgtctgaccgtttggcttatgatgctgctgtctaaaaggttcttctcccctctggaaacgacacaggacaggagctgaaggtccgatcgcccccggccgccctcctgcccctcactccccaggtccctcctctcccgagactttctctcctatccacactaccctggctctgagcggcacaaacccaccatcacccacatccaggttcagctgtccctagagcacaagtgtgcggccccagccccacctgcctggtgaccgagaaaagagacaatagaaacccacaggccccatcttgacactgtgcaaacaaggaccctgctgtgtcctggtaacggggagaggcggctaagaggccacactgtccaggagcccttccccaggagaaggacagcgggatcaggatggcagttttcacagtggatccttaggggtcataatgcccttggggctgaggggcatacgaagtgtgggtgccacctgggtgggaacacgcccagagcgccaatactccagacctctgggtaaggaaaacgttctggaaatagggatgctgcaggacgctctgaatgtagttaatactttagaatagttaaaacgtggccgggcgcggtggctcacgcctgtgatcccaccattttgggaggctgaggcaggcagaccactcggagctcaggagttcaagaccagcctggacaacacagcaaaaccccatgtctaccaaaaaatacaaaaactcagcccagcgtggtggcacgcgcctgtagttccagctgctcgggaggctgaggttagaggatcacttgagcctgggaagcagaagttgcagtgagctaagaatgcaccaccgcactccagcctgggcggcagagtgagaaaccctatctcaaaaaaaaaaaaggcaaacggggccaggcgcggtggctcacatctgtaatcccagcactttgggaggctgaggtgggtggatcacgaggtcaagagattgataccatcctggccaaaatggtgaaatctcatctctactaaaacaaagattagctgggcatggtagtgcatgcctgtagtcccagctactcgggaggccgaggcaggagaatcacttgaacccaggaggcggagggtgcagtgagccgagatcacgcaactgcactccagcatgggtgacagagcaagactctcccaaaaaaaaaaaaagggcaaatgttgttacatgttttatcataattgaaaaaaaaaaaaaagctaacagtcaaaagcagttctgaggcggctgtggcaggagagtggccagaaagcccacagctgaatgcgaagaccaggccacaggcatcagcgcaacaccccaacttggcaaagctgcagaacatacctattgggccaaaggtgccaggagcaaggttcccttaacgataaggagagcaacgccaccctctgcagaccaaccccagaactaacctgggcagagctgcctggggccactcaccttcttaaagaggacaaccccatctttgtcgagctggtatttggagaacacgtcactgttggaagtgatcccaaatggtatgtcatcgatggcctctgctgcctgcaaaaactgcttggcagagtccgactccacgtcctgaatgaggagggagaagcagaggtcgtcatgatcccgcagcaccaagcagtagggcagaccctgtagagcccaggccaggggggacacgtgcagaactgccagctgcaggctgtggacccctcctcaatggatgacggaaggaaggaagactggaatgctctggtctctaccttgaagaagccgatgacagccacctcgctggactccaccaaggactctgcagctgcgccgtcaggcagggtggtggcagccgggcccgtgcgcttcttcagccagttcacgatgtcatcagcctctctgccagctaaccccaaacaaatgtaggttctactctcaaacagggagtgccgcctgccctgccgcgcctgctcccgtctctgctctctgccagccaggctgaggacacctgaatcaacctaagtaagatgttctcccaccatggaagaggcccggtgccgtccgcccgcctcctaaaccccagtgtacgtgagactgtggttgtgtttatggggagtggagagggaagagggtgattctgtctctgaataacaggatcacaaacccattttttttctctgatctctctgcattttcttttttcttttgacacaggggctcactctgttacccagctggagggtagtggcagaatcttggctcactgcagcctccacccactgggctcaagcaatcttcccaacctcagcctcctgagtatctggggtacagatgcacgctaccacacccagctcatttttgtatttattgtagagacggggttttgccacgttgcccaggctggtctttaactcctgtgctcaagcagtttgcccaccacgacttcccaaagtgctgggattacaggcatgagccaccaatcccagcccttttttttttcttggaagacagggtcttgctctgtcacccaggttagagtgcagtggcatgatcatggctcactgcaacctcgaacttctgggctcaagcaatcctcctacctcaggctcccaagtagctgggaccacaggcatgtgccaccacacccaactaacttttttttttttttttttttgaggcggagttttgctcttgttgctcaggctggagtgcaatagtgtgatctcggctcactgcaacctccacctcccgggttcaagcaattctcctgcctgaccctcccgcgtagctaggattataggtgcccgccaccacacccggctaatttttgtatgtttagcagagacagggttccccatgttggccaggctggtctcactcctgacctcaggtgatacacctgcctcagcggtctcccaaagtgctaggattacagaggtgagccactgcgcccagcaatgtttcttcttttttttttttttttttgagacggaatctacctctgtcgtccaggctggagaatgcagtggcgccatcctggctcactgcaacctccatctcccaggttcaagtgattctcctgcctcggcctcccaaatagctggtattacaggcgcccgccaccatgcccagctaatttttgtatttttagtagagacggggtttcactgtgttggccaggctggtcttgaactcctgacctcgtgatccgcccgcctcggcctcccaaagtgctgggattacatgcgtgagccaccatgcccggccaatttttctattttttgtagagatggggttttgccacgttgcctaggatggtctcaaactcctgggattaagcagtccgcccacctcggccttccaaagtgctgggattaccgggatgaaccactgtgcccagccctagctaatttttgtattttttgtagacagggtttcaccatgttgcccaggatggccctctgcattttaaaaattttattttttgaaacgaagtctcactctgtcacccaggctggagtgcggtggcacgatctcagctcactgcaaccttacctcccaggttcaagggattctcctgtgtcagcctcccaagtagctgggattacagacgtgcaccaccacgcccggctaatttttgtatttttagtagagacgggggtttcaccatattggccatgctggcctcgaactcctgacctcaggtgatccacccgtctcagcctcccaaagtgctgggattacaggcatgagccaccgcacccagcctgtcctctgcgttatctaaattttctttgacatgtacatccatcaaacacatgttctcacccaggagtctgacagcaggcctcattttagagaggtggacagtaactcaaaactcagtgccagttttctacctctgggaacaggctgacgccccgcccacctgactcccgcgcctcctaacttatcccaggcgtttcgggagttctcgccaatggcccaccctccatgcctcccagaccaggaagaagatgacacacttttatgccaccaaaggcggtcaactgacaggaaagaaacttcctcctcctgggagactgaggctaaggaatgatgcctctcctttttccctcctagaacttgactccctggtccgaatcgggaaaaccccattcagatgtagaaggattccaccagtgctaacaagacggtcaccagtgacaagtggatttaggagtgctcatctcatctgcaaacctgagtgttagtgacagaaccacggtgactttggacagagcacttcccgttccaaaagtgaacatgagtaaaaaatgagaacatcaatcacgcctgtaatcctagcactctaggaggccgagacgggtggatcacgaggtcacgatcgagaccatcctggccaacatggtgaaaccccgtctctactaaaaatacaaaaattagccaggcgtggtggtgcacacctgtagccccagctactcaagaggctgaggcaggagaatcacttgtacccgggaggcagaggttgcagtgagcagagatcgcaccactgcacgacagagcgagactgtctcaaaaaaaaaaaaaaaaaaaaaaaaaggaaacatcaaaacagccaagtgagaggcaaccacagagctgctgccactagaacaggacagggcacacctgcttaaggggacaaaaggaaacatcaaaacagccaagtgagaggcaaccacggagttgctgccactagaacaggacagggcacacctgcttaaggggagaaccctgctaacactggaatgagctgctttcgggctacccaccatgagcatctgacatgccacagaaccggttttatagacgagttttcttttgccaccgtcactgatctggctacacaggggctcggcctccactacggcagcttcagaggcggcagacgagcagctgagggcccgtgctacagacggagcagggcgggcttggattcgaggtctgctaccgacaggctcgatgctgttactcagctgctctaagcctcagccctttgtctgggaaaagcccgcctcacagagaggatgcgaggagaaatcacgcaagcacgtgacgcggcagctggcacgctacacacgacagctagcaggtgtcaccccgagagctacagccatgctgctgctcctaggaacagggggcagcacaaacagcccatgtggccagaaaggcaccagtctccctctcctcgctggtcagtctccaaacagacctcagccagccgcccccaggatggcaccagacaagacaggttctccattcgaaggttcttccaggatgaaaactcctcacaagaccctcagggcacaagtggacagagaacccggcctgaggaacgggatccctccaagcctctggaacccggcctccccaccgctcagacagctgcccctgcccttccaagtcggcaggccagtccctctctaaagacagttcaagggcagtgccacagccacacctgtatattccttgggggaagccgtgtctccattcctgaagaacttgatggtgggatagccgcgcacgccgtactgctgggccaggtcagactcctccgtggcgtccaccttggccaacctgatctcggaaccttctgccttcagcttcccagcggctttggcatactcaggggccagagccttgcagtggccacaccaaggggcatctggaagcggaaatgagatgctagaaagcagccttgatccctaaagcagccttgatccctcagcagtgcttccctttttcctctggcatttcccttcataaaaaccttatctactcaccaagataacccctcctaacgcacaaggctgagctgatagcctggtgttcttgggcaatatcaggacagaggccgtgaacgacaaactaccaccaaccaacaccagcccccactctgctatgtcaccatcagcacagccagacaaacctttcaatggttgctgacttcttattccccacaggcaactaaggcaaggatctcccctagactttccctttaagactacagacaaaagtgaagaagtgaccgtggcggcctgtaccagcactagctgtgagtatgagatgcacatccgtgcacacagaccctgagttgcttagggtgagaataagacgatctgtcaatagagttagcagctgtgtcaggcacaaggttcccaccccagggacagagctcaaatccttatggacgtgaggaaggcttgggattctcctctgagacaccatcggaaggactgctgtggcaagctgaaggtggggtgggcaggagcggggcgccttccgggtcggcccccggggaggactcggcaaggctggacactggcttgctctgtttgctcacacaggtcgatcctgttcttctcgcactaacaggaagatcctgccgtgcgcagggcgggcatcgggacggccccccggctcccagcccggctctcacccccagggagcccctgacatggcccccaaggcgggcagcaagggagcccttcagttccgggcgcgccgggggtcccgaccccgggggctgccgggccgtgcctgcgtcccaagagcctggctcagcggccccgagccccgcccgcccgccaggcccggcgctcacagaactccaccagcaggtacttgtgggccgccagcgcctccgcgaagttgcttttccgcagcaccaggacgtggtcctcctcctcgggggcgtcggcgcgcaccagggcggccacggccaggcacagcagagcgcggcgcagcatgtcggacacggatcaggcggggcgcttcggttggcgccgccgggacagcgggggcgacgagagcgcgcgccggtcccggcctcgcctttataaatcctgggtccggggcgcgcctgcccccccgcccgcgcgcgctggccgcggcgcgcacgcgccgctggggcccgccttcgattggccggcggacttcgaggctcgtctttgccgctctcggattggacactcacaccaggcctggccccggattcggaaacgctcctgagtgctccctggccttcgttcgggattggccgaggacctcgcgctcgctgtctttcttagcctctcattggctcccgacaagaactttttctgccttggcttctaattggtggctttcgcctgcaccttccacgggtctggaatggctgcccctttcggtagcacggactctgcgcctcctgattggccaagggatgcgcgcactctgcgcgttccttcgtcgaacgtggcagtggggaggagttcccagtttaggggcggagctgcggctgcgcttccgaaacccctcgtgttgcattctgactggaccgcgtacccaactggcacgccccccggcccccggaccggaagttggggtgacgcaatttccggcgcgcgtgtcaagcgtgcggcggcggccgtggaaggtggggttggccgcctagggtcggcggtgggctcggtgtgggatagccggcccggtccgacgcgctccgcgaggtcacgcgagacactcaccgaggcatggcggcagggcctgggcatgggaatcgtgcgcacagtgcgaggaagcctcggaggggatacgagcacagggcgggtggttaggagaatggggctggagagacgggcgggaggggcgggacctgggccccggggacctgccggctcccaggccccaggaagacgctgctcatgcgtggagcggccgcaggaaaggtactccccgctaaggccttcagggagcggccctttgccctgtgcgatctcttccttcctttcccacgggttgccaaatcctgtgacgctgccccttctctggtgcttctcagatgctctggtcggctcaggagacctcgcagctgttacacagctgtggaaataccctgggcgctgcttcactccgaaggcagcagctgggtttgcctcccgactcgacccgccaccgaggctcctgagcacttgaaatatggccagtccacctgagacgggctgtgagtgcgcaatgcacatcaaacttctaagactgagtgtgcggggccgagtgcggtggctcacgcctgtaatcccagcactttggaaggccgaggcgggcggatcacgaggtcaggagttcgagaccagcctgatcaacatggtgaaaccccctcacctcccgtctctactaaaaatacaaaaattaacagggcctggtggcgcgcgcctgtaatcccagctactcgggaggctgaggcaagagaatcgcttgaacccaggaggcagaggttgcagtgagccgagatcgcgccattgcactccagcctgggcaacagagcgagactccatctcaaaaaaaaaaaaaaaaaagtgtgcgtgtaggggctggaggacagaaggtacagtatttcgttaataactttacattgactactacatgttgaaatattctgtatgcatatgttggattacataataatattgaggccaggtgctgtgtggctcactcctgtaatcccaccacttttggagaccgaggcaggaggatcccttcagcccaggagttcgagaccagcctgggcaacatagtgagactcccgtctctacaaaaaataaattaaaaaaattagccaggcacggtggtgtgcacctgtggtcccagctacttgggaggtggaggtgggagaatcatttgagcccaggaggctgaggctgcggtgagccatgatcccaccactgcactccagcctgggcgacagatcgacaccctatctcaaaaaatagtaaaaaaatgtcctttttttaaaatttttattttttatttttttgagacagaatctcactttgtcatccaagctggagtgcagtgggcgatctcggctcactccacctcccggattcaagcgattctcctgcctcagcctcccgagtagctgggattacaggcatgcaccaccatgcccagctaatttttgtatttttagtagagacagggttttaccatgttggccaggctggtctcgaactcctgacgtcaggtgatccacccgccttggcctcccaaagcgttgggattataggcgtgagccaccgcaccaggcctcctcttctatcttttaacgtggcttttagaaacttttaaaattacatagatggtctgcattttgttagtgttggacactggcagccctccgtctccctcactgcctggaatctgctgctctccttttccccaggtgcctgccctctccattcctcctcactttcctccgctgggaatcggcaccgccactgattttaaagttgaaacttggcaggcaaaagggaggtactcccatgttaaatgtatacacattgactgcaatagtatcctgacttttgaaatggtaaaacgtagagtaagttgcttttgtactttgagagtttctgtttgttgatcagttgttcctgagaacatgcttctccttccgacagggaactccctccactagaatatgagctccttgtggtcaagactgggtcccctgttcccttccccccagtgccagcggagcaaaggtcagtcagcggcataagttgtacctgctgggagaactgtctgcttcctccgggtgacttttctggccaagaaggaatatgagtatgtgcctccctgagcactggcctggagcccactcaggaaacaccatctcttcataaatggttttgattgcaggcattgttccttctgctctctggatgatggaaattgcttcaggtcactgcactatcttccaacgtttttgtggttgccatgagctgttgtacagaccacagtttggggcctgagacaagctgggcatggtgttgcatgcctataatctcagctactttggagggtgaggcaggagaatagcttgggcccaggaggtctaggctgcagtgagccatgatcataccactgcacttctgtctgcgtgacagagaccctgtatcttacataaaaccccagcccatatttgtaccacatctagatacgaggtcagagttcagatgcctaaatattgtagcttgtgttttgtccactgttgggggaagagtgaagagatttgacataccataatgttgattagcttgtgatggtttggcggcagcttaggccagagcataaagtaaaaaggaaaagtgttcacagacaatgaaaactgggaccaagtggtgaatactcaaggcacacagaccaggcaaggatcccagtggccgtggatgagtctcaggctggctctgggccagtggaacacacctcagtgtgggtgaaggcctagccagggtagcagagggcagggctacagaacagcagcccaggtggctgtggccgacctgacattctcctgtgaaaatcaggtgcccaaccagcactaatctagatagatggcagcattttttttctttaaagacaggatcttgctatgttgctcaggctggtcttgaactcctgacctcaaaggatcctcccctcttcagcttcccaaagcactggggttacagatgtgagccagcacgcccagccgaatcacagtatcttagacagatgccatggctgcccatagggtcctctcaaggtgcctctgcccttggactggcttcctacaccaacctgacaggtgcagcaaaggtggactttctggtaaggctggaggaggaagcctggtctgcgatggcctgagacgccctctatgggggttgttgagtggatggaaatgtgcagggcatgggtcctgcccccaagaatgcaggctggttccgctgggcacctgcagagggctgatgtccttttcctgaggcctgctcctgtgccttctaaccctagggtgagaagatgggctgtgttcacctcatgcccaggcccttcgaggagtgtgcccttgggggtcagagccctcctgtggctggtatttctttggatcatcacaggtgctccagacatcctttagggagtctcaggcttggtgaagggatccattaaatgttgcttagttggtttttgtttgttttttgttttttcgagacagagtctccctctgttgcccaggctggagtgtggtggcgtgatcttggctcactgcaacctccacctcccaggttcaagcgattctcctgcaacctctgcctcccaggttcaagcgattctcctgccttggcctcctgagtagctgggattataagcgtgtaccaccaaccctggatgatttttgtatttttagtagaggcagggtttcaccatgtttgtcaggctggtctcgaactcctgacctcgtgatcctcctgcctcggcctcccaaagtgctgggattacaggcgtgagccatcatgcccagccaactggtttgtgattaaatgttttgattgatgcagtttttgaaatgtactgtgtgtacaatattactcttttgagacagggtctcactctgtcacctaggctggagcacagtggtgcagtcatggcccactgcagcctctgccttgtagcctcaagtgatcctcctgcttcagcctcctgagtagctgggactacagttgtgcaccaccatgcccacctaatttttatttttttaaagatggggtctcctgtgttgcccaggctggttttgaactgctgagctcaagtgatctgcttctggccagctactactcttaaaagtagagttctcagagcaaaacagctccctttcaaccttcagtccggtcgaaggtgtggtgggggtaacaacagcaggctcatggatacctgggcagtgctccgaggtccctcctgtgttcccactgagcagcagcctgctgtgcccggagtggaggtgagaaatccagcagcagcgcggtggtgagtgtgggccctgcggagtgtggcaggcgctcattatggtgcagggcagtgttgggcacagagaaggttctcagaaaccacagtaacccatggttagttggtcacatcccagaccctgacctagcactggctggcactgtgacttgtcactctcctgaatggaagaagtgtccacctgggggtggctgaggaggtggatgctaggggactgctgggagccacggacctgtggaggttgggagaggagactgcaggcgcaggctgctggaggcgaggaggcctctctggagcgccaggccatacaaacaggtcccaggtggggccacgaggatcaggttagacttgggacccgagagacacgtcatgcccactgtgcaggtgccacctcatgttatcctgcaccaggggaggggccagcccaaagtcctggctgctggcagcatgcccgtacagcttggcacctgggtctgagttcacatgtctagcaaagctgggaaaatccaggagcaagaaggtgaagccctttggctcagcccaagctcagaaggcccttgcccgatgagccgaactgctgacaacaccctggcactgggcttggggactcccctggagcatgtaagaagtgaactgggagcgtgggagaaactgtctggcaggggctgctgcctcggagctcatcctccctggctgtgctggtgtctgtccagtgggattagcctccatcctgtggtttcaccaccccaccgcctctctcccccacagcacaggcagaagcagcaacgcaacacgagaccacctcgcttggggctagtagcagttctgggaaaggctcggtagggtctttgctccctgcggaatcaagggctgggggctgacccaggctttctctatagctgcttccagatctgggtctggaccagcttctgcaggaaggcaccattctgttggggtgtctgacacggtcagctctaggctcagcctctgcggcccccacaaaggcctagcaaggatggggcaaggtggcagtggtgcccgcacgcactgccctggcacaggtgtgtagttagtgacctgaagcatgagggcatctccctgcccaccccagctggagataagccccttgcggggcccaccctgctgataaaccccagagcagtatggcctgtgtcagaatgaccagtaggagggccccggggtagcagctgcccagcccagctgcgtgtgtgtgtgaagtattttcctcaacaccttataccacagaaggcagattttgaaactcgcatcaggccagaaaaagaatttctgaatggacacttctaaggggtgcctggttactcatctgcctcttccccctgcagggtagaggggcatgggtttgaagttcccgggggctcttggagactgcagacacggacgagctggggttcctggatgctgcagcagttggggcccctggctgagcgcacctgccccaggaggccctgcgtggttcccccagtagccccttcacaccacaccgcagtgaggatgccctgtctcctgccgatcccatcacaccaagccttttcgctgttgggctcctggcactgcccgatcctggagggcacttggctgcggctgtggctgtgaagggctggtgctctaggcgcctccgtggcccccgttgcctgggcacctacttcctgcctcagccacagctgcatccacgtgcgccaggggccacaaggccgaccctggcttgggcctgttcctccctgggtttccttgggatccagtcattggagggcccgcgcacagctgggccaactcgacacctccaagcccggccagggaatcaagcagctctccctctggcagcatgagctacacaagccaggcccgtcttcccattcccttagcaaggaggggcaaccccagccaaggccttctgcactgttctagactgttgctgcctagggctactgtagctgggagtcacattcctttctccccagatagttgcaaggggcccagcagccacagcacttcaagggggccctgcccttcccctcccaccaccccaccagggtccccatcttcccctttgtctcctaaagcccgtgaggcagtagaggagccaggccctcccctgccacaccctggagaagccaagcagcagacacccccagctccttcaggggcatttatttcccggtcagaaaagaagcagggacaggcgcctctgcctgagcctggcagacacaacacgaagaccggggatggggcgggggaggcacaggagacggctctcagcaatgtgtgcacttggtcccttgtttgttcctggctgggtcagggaaggcctgccgggggtggtggcactgagagcctgggggaacaggcgccaggccagtggcccagggacggcacggacggaggcaataaatactgatggccaggcggggctcctggctgggcccaggtggggtgagtgaggctgtccatcgagggctcttgggggggtgtgggctctgggcactgcccgctgagacagaaaaggcagaggcaggacaatacccagcctcctggatggtactgaggtgacttgagttttggcaatttggctttccccaagccgccggagccatctccacagccctgtccagggaagggggcaggctggccaggcactggtgggctggggagcagcagcagcacaccccacgtgtccctgggtcactgggttcgccaccggggaagggacggggaggccacatgctcatgcagacacagggagttagaggctagtgaggccccacggtacactccacatgttaaggcatcatggttagacgggaccgacagcgacaagggggctggccagggagcagcggggctggaggacggcccggcccccacgaggccgtgcatcccacaccccagctccaccccggagcagcagacgcacacgtccaggggcaaccacggggcctggagaatggctgctccgctccctcctgaagccaggcctcgggtgtgacggggagatagaacctggggggcacagaaagggcagcagaggcctggctgcggcctctctcccccacagcacaggcagaagcagcaacgagacaggagaccgaggaggctgggcctgtgggtgggggagggctgaggaggggggtcggaggcactcggttgagccaggccagggaggcggaccagggtgggaggggcacggagggcctgtcagcactttggtatggggaggggaggggctgggggggacacatccgcctgtccgtcgtccgtccgtcagtctgccctgcccgcctctggctgggctcagtccttccagtccttcttgatggtgagattccactcccaggacaggtggtcggtcttgtcgtcgtctgtgaagcgggacttgatgctgtagctgccccgggccagcatacccttgggtgcctcctccacgggggtcaggaactcgtactcctcggcccggggcccatagctgcctaccatgtagtcagtcttgtcaactgcggcacaaggaagagggcggtcagcggccccgcttccccgcctggcagcacgcacccaagcggccccctctgccctgcccggggccccactcactcttgacgcctttcctgtacgtatgctggatgtacttcatgccggacactatctctcggttaacctgcaggacccgaagcgaggatcagggaaggtcggtccggaccccagccccagccccgcctccattccctggccacagcagcctgtagcttacccggaaagagatttttatccggtactccacaccctccttcagcacaaacgactgcttcttgaagctctccaggtcgcctgttggggggacctccccctcaatgactgcccagcagccctgcgcgaagccccagccctgcgcggccccctggctgcacttcccgagatccccaccaggggccgcccggacccccgcggccgcagggcactcacccgtcaggtccagctccagggggcccggggccgagctgcacaccagggtcaggccagtcaccacgacgttggggacgttggggtctggggagtgacagcaggtgagggccccacccccaccagtggaagtaggggctggggagcggcaagacagctggagtgaacgggcggccacccggctcccgcagcccagactcacctgcggaaacggccacgcggcccagcagggcctccttgtactttcgcaggctctcgtcgtccttgtccagctcctggatctcctggatgctcttctgggccgggggcttgtagttgaccgagtgctcatcctcctcgttctccgctgcaatctgggccagctgctcggctgtgggctcctgctcagccatgctcaagcttagcctgggtcgggacacctgtgggcgggacggtgacaggccttggacctggatccccaacggaggcgcacttctgagcaggagtgtgggctgcagccggagctccaaaagggctccaagggggccaccttcgctcctctccacccccgcgattcctgctcaggggcatcctctggggcagtgtgaggtgcccccaccccaggtataacatctaagacaaaatgggaactgcagccgatcatggggagagaggacacacctccccctccacgatggaggaggcagcagccccctgtatgtgtggggcggggctagcaggccccagaatcaaccggcggggcccacactaaaccctctcttagggtcttgccgctcttgagctgcccaggccctcgccctacggggtaacggggctcggtatccctcagtagggttgctcctctggccgtggtagtcacatgtaaacgtgtgtggtcggctcagcgtcatctttcaaacaggatgcccctggagctcggatgttaggggcagctagaataccgcacggggccacctggacacggggatcctaagtatctgcggtttctccacaattgtgagggtctgtgacctacaacttgggagctaccacagccactcagtactctcgggccctcttgtagatggtgggcccggagtgcccggggcagcactgacccggcaggggatctgtcaggctcagatccttcccggcagcgtgggaggtgggtcagggagcagcacacccgggacacccaggccggggtccaggccgccctgcttcctccaggggctggggcctccgcgccgcgcgaggatagccgtaggcgccgggatcctagggcgcggcccgcacttccgcagggcccgcaatccgtgccgggcgtggcccgggcgctgggggaggccgcgccccaatccccgcgtcgcccccgaacgcgatggaccgcggctgccggcccggcgccccccgcgtccccaaggaggggccctcaggtctggcccgggccccacgcgcctcggcggccatgaaagaagctccggaccgctcgggaggggccggcactcccctggtccccgccgcccctccggcccgggacccgcacgtggggccggggccgccgccgcccggtcccgccccggccccgccctagcccgcaccgccctggcccgctgtcaccgcgcccccgcccgccgagaccctgccgcgggctcagggcggggcgcgaacaaaggcggaagcccccacctcagcgccccccgcccccgccggcgccgccggtccccgccccgacccgccgcctccgccccgccgcctccgccccgccacggccactcaccggagggttcggccgcgcggttcaggatccctcccgcactaaatgacgaacgtcgtcggccgccccgcccgccctgcctgtcacttccggggtcacgagacttccgctcactcgggcggggaaggccagggcgcatgcgcggcgcgcgggtggccgggggcacgccgtcgccatcttgcggctgggcctcgtgggcgcgttccgcgtgggttctggcgtcgtcaccttccaccccaagccccgtcagtggtcacctctgtaagccagggcacttccctacgcgagcccagggcgcccgcacccgggaggcgaggtccggtcccgcctctcgccgctgcccaacccgcgcccactcgaggcctgcggcggccgcgtgggctgtggaagcccgcgcaggtgcagtgcgctgccctccccggcccagtcggtccgactgcgactcttgcttcggggcctagtcacctagtcccgggacttcggggaggtaacgggcacggggattaagttctcgttaaacacgggcgagagcgctggcgcgcgggccgttccagggccttggtgtcccccgtggaaagacagggctgtggggctaggaggagccccttgcacgccccgcggaaagctggtgctgggcgagggcgcagcggaggtgtttttctccaggctgagacagaattcgtgcgcagcgcgcgtggctgcctggcgcaggcgccgctgcagaggccctagtgtccctgaggaatcccgcggctcctcaggaccaggaggcagggagctcctggcaccgtgagcagatgaggggctgcctcagcctgggcttcaccgcagagccctgttccccactccgcttgttccgagattccacacattcgcccacaagggccgtgttgaagtatcaggaacggccgcataacgtgagtggcctggcccagcagcagtgctcgcacccagccccgggctcgcctctcctggaggccaagcccctaaatgccctgcaccagacactgggtgggacgctgccccgcgtccagcctgcagcacttgttaggactgtggactcgttaacgtggacgcctcttttatttattgattgattatttttttgagacgtagtctcagtgtcgcccaggcttgagtacaatggcacaatctcggctcactgcaacctccacctttcaggttcaagcgattctcctgcctcagcctcccgagtagttaggattacaagtgtgagccaacatgcccagctaatttttgtatttttagtagcgacagggtttcaccatgttggccaagctggtctcgaattcctgacctcaggtgatccacccacctcagcctcccaaagcgctgggattacaggcatgaaccaccggggtgcccaatctttttttttttttttttttttcttcaagacagggtcttgctcttttgcccaggctggagtgcagtggtacaatctcagcttactgctgcctctatctcctgggctcaagcagtccttccacctcagcctcccgagtagctgggactacaggtgtgcaacaccatgtccagctaattttttattttttgtacagacagggtctcactatgttgctcaggctggtcttgaacccctgagctcaagcgatcctcctgcctcagcctcccaaagtgctaggattacaggtgtgagccaccatgtccggccacccagcctcttttaatcactcttgagctccatgcagacagggccctgtctgtttggcccatactgccaggcaacccaggctgatcaagagaagtggagaccacacgcacacacacacgcacagctgctttgttcagacacagacatgaacacaggagggcatttttggggacagaactatgcaaaataccgagcttggtgtcttttgaaaatttctgaatgttggagggatatttgagagtttctgtaactgagtcacactgtcagtgccatgtcatcagcacagcgtttcctaatcaggtgtgaaatgcttcactgttaaagactcagagcccctgtgcaggtgatcatgttgcccaactttccaataacccaagtgcttttaaaaaaaaactgttgggccgggcgcggtggctcacgcctgtaatcccagcactttgggaggccgaggcgggcggatcacgaagtcaggagatcgagattgtcctggctaacacggtgaaaccccgtctctactaaaaatacaaaaaattagccaggcgtggttgcaggtgcgtgtagtcccagctactcgggagggtgaggcaggagaatggcgtgaacccgggaggcggaacttgcagtgagtggagatctcgccactgcactccagccggggcgacagagcgagactctgtcaaaataaataaataaatacataaataaaagattcgattgtgtgggtatacattttgtttgtaaccattccagttggcaaatatttggtttcttttttgtccattatgaataatactgccataaacatttacgaatattataaaccattataaatgttgcattaagccttttcatgaatatgtgctttcatttctcttgggtagattcctgagtggaagtccccaaatgttttccaatgtaggtgtgccactttgcaccccctagcaacgctgggctgctccaggtggccacaggctcagcaatacctgctgtgcttgatcccagctgtacaagtgtgaagcagtgtcgtgtcacactgtgagtcgcacctgcacttccccaatgagtcttcctgggcagaaacctatttaaatcttttgctcatttttaattgggctgtctgattaagctatgagtacttacatatcctgtatacagtcctttatcagatatatgaggctgggtgcagtggctcacgcctgtaatcccagcactttgggaggccgaggcaggcggatcacctgaggccaagagtttgagaccagcctggccagcatagcaaaaaaactgtctctaccaaaaatacaaaaattagccgggtgtggtggtgcacgcctgtagtcccagctattcgggaggctgaagcaacacaatcgcttgatcccagaaagcagaggctgcagtgagctgagattgccccattgcactccagcctgggcaacaagagcaaaactctgtctccaaaagaaaaagataggtgatttgcagacattttatgtggtttgtctttcattttcttaatgatgtcttcttaagggcaaaaccttttattctagtgcagtagttttttccacatggtgcatgcctttgctatcctaagaactcctgagctgaggtaggcggatcacttgagcccgtgatgtcgaggctgcagtcagctatgattgtaccactgcactccagcctgggtgacagagaccctgtctcaaaaacaaactcttagcccaaccggatattgtaaagattctctctcatattttttctgtgatcttctgctatattttatgtttgctgacatttagatatacagtccgtatttgggttaacttttcgtatggagtgaacatcttttctgtgtgtaggaacatccacctgtcctggcaccccttgttgagaaactatcgtttcccccaatgcaatgtctcaccacctttgttgaaaatttattcaccataggccgggtgcagtggctcacgcctgtaatcccagcactttgggaggccaaggcaggcgcaacacctgaggtcaggagtttgagaccagcctgcccaatgtggtggaaccccgtctctactaaaaatacaaaaattagccgggcgtggtggcacatgcctgtagtcccagctactcgtgaggctgaggtgggagaatggtgtgaacccgtgaggcagaggtttgcagtgagccaagatcgtgccattgcactccagcctgggcaacaagagcaaaattccatctcaaaaaaaaaatttttgttcatgtaaatcgaagggtttattacaaaaattagctgggcatggtggcgcacacctgtagtcccagctactctggaggctgaggtgggaggatcacctgagcctgggaggtcaaggctgcagtgagctgtgatcatgccactgcactccagccttggtgacaaaaggagatcctgttgctgggcatggtggctcatgcctgtaatcccagcactttgggaggccgaggtgggtggatcacctgaggtcaggagttcaagaccaacctggccaacatggtgaaacgtggtctccactaaaaaatataaaactagccaggcatggtggcacatgcgtgtaatcctagctacttaggaggctgaggcaggagaattgcttgaaaccgggaggcagaagttgcagtgagccgtgatagcgccattgcactccaacctaggtgacaagagcaaaactctgtctccaaaaaaaaaaaaccaaaaaaaggccaagtgcggtggctcacgcctgtaatcccagcactttgggaggctgaggcagatggatcacctgaggtcaggagttcaagaccagcctggccaacatggtaaaaaccccatctctactaaaaatacaaaattagccgggcctggtggtaggtgcctgtaatcccaggtactcgggaggctaaggcagaattattgcttggacctgggaggcagatgctgcagtgagttgagatggcaccattgcgctctagcctgggcagcagagagaccctgtctctcaaaaaaaaaaaaaaaaaaaaaaaaaggacaaaaaaagacagacagacatatatgtctttgccaatgctacgtcctaaaatgatggcatcacattaactggctttcttgcattactaaaaggatgaacttttaaaataattttgttatttaaaaaccttgtttatttttatttgttgagatggagtcctgctctgttcccgaggctggagtgcagtggtgcgatcttggctcaccacaacctccacctcccaggttgaagcaattttcctgcctcagcctcccgagtagctgggactacaggcacgcaccaccatgcccagctagtttttgtatttttagtagaggcggggtttcaccatgttggccaggctggtcttgaactcccgacgtcgtaatcctcctgcctcagcctaccaaagtgctgggattacagatgtgagccaccgtacccggccagaaacaactgttttttaatttttcttttgagacggagtctggctctgttgcccagactggagtgcaatagtgcgatctcggctcaccgcaacctccgcctcccaggttcaagcgattctctcctgcctgagcctcctgaggagcttgggactacaggcacacgccaccacgcccagctaatttttgtattcttagtagagacggggtttcaccatttaggccaggatggttttgatctcttgaccttgtgatcgcctcagcctcccaaagtgctgggattacaggcgtgagcccctacacccggccgaaacaactttttaagatagaatctatgttgttcaggctggattcaagttcctgggctcaagtgatcctcctacctcagcctcccaagcagctgggactataggcatgtaccacttcgtccagcttccggctttttccatggttgtaaactgcctattcatgttcttggtggtaaatgtttcccaaggttgtttgtcttgaatttgtgagattgtctgatttgcagaagtttttgtttgagagtcttgctctgtcacccaggcagtacagtggcacgatcttggctcagtgcatcctccacctctggagctcaagggatcctcccacctcatcctcccgagtagttgggaccacaggtggcaccatcatgcccagttaatttttttctttttatgttacagcaatgagtctgggtactttttgcattttttaaatgttttttgtagagatgggttttgccatgttgcccaggttggtgacttacagaagttttttttttttttttttttttttttttttttttgagacggagtctcgctgtcgcccaggctggagggcagtggccggatctcagctcactgcaagctctgcctcctcggtttacaccattctcctgcctcagcctcccgagtagctgggactacaggtacccaccaccacacctagctaattttttgtatttttagtagagacggggtttcaccgtgttagccaggatgatctcgatctcctgaccttatgatctgcccgcctcggcctcccaaagtgccgggattactggcatgagccaccgcgcccggcctacagttttaaaaagtccttactgtcctgcaaagatagggactcttttacctaacaataccatgaacacacccaccaaaactgacaatgctttctgacatctaatagtctctgctcaattttccccaagtctcttcttgcaattgtgtccccacatcagaatctggacagaggccgtgctgtgcactgggatgcccactgcctctatttcctcttctgcgcttggtgccacccaggcgtccaggagccagtgtgttttgctgacaatgtcctgtgttctggatttgctgggctgaaccctccaggtgtcctgtgaaccctctcccatcctctgcacttcttaggcaggatgagcccagttcgagttttagaggcggtgctgggggcctcctgctgcttcacgtcattggacttgtcttctggtcctacctgtagtgaggtatggttggttctgggaagctgggctggtccacccattatcagtggcctcctcaactgtcatcttcaattttcactgtttctcacatgcatcattttattggacacttcaaagtggtgattttctaattttgggtgtgttttttttttttttttttgagagagtcttgctcttttgcccaggctggagtgcagtggcgcactctcggctcactgcaacctccacctcctgagttcaagtgattctcatgcctcggcctcccaaagtgctggagttacaggcatgagccaccgtgcctggcctgattttctaattatttctgtatttcttagctggaattatttcttttttttttaaaggaccccgtcatcaattgttgccccaaaattatagagttcatacagaaaagacaaattaaatgcccgattctttccttttatttgccaatttttatgagtcagtgccttacaacttccaaaggtaaacatgaggcttctttccttaagcatcatcatgaactcttagatgttcatttattcaacacaaactaaaaaaggaatgttaagtcttaagatatcattaatactaacttgcattacttgtttatgaaggattaatatactaaatagaatatatgctcacatttttatatgtagatattaatttacaagtaattaacatgctaaaacattttataattcgcttcaataacgtgtatagataacacaaaaattaactctggcctaccttaggctacatgatcacagacaagctgatgtaattaaaatgagaagatttatttcttggtactttcatggctttatttttacattaaagtcttttatgatgtattatttattgctatcttccaccaaatgcttggccagtcaatcccagggtgatcttaataataacaactaatacatgtaaaccataaacatttatgaaaattatatatcctcatataaatttcataacatatgtaagttacaaaagaaagaaaaagtcaacgaggatatgggggaagccaaaaggaatacaaactaacaaatgaacctaactatgtacaaattatgcaaatcacataatttgcaggaggtggaaagaaagaaaagaactcatctaggcaacttttgaaaccagtacttagatgctacaggtcaaacacaaaaacaacagtacacgattaaggaagtaaggtgcctccatagtgactgcgcctccctggggcacaggttgaacagttcacctacagcactgacatggcctaagcgaatgtcctgtcaatctgagagccaggtttctccctgtcacaggaagaaactacacataaggaaaggggcaggtgagacaggaacagcaggaactagacagctacagaaaccaacagggcgggtaaatgcacaagcacgtgtcatagatccacttcccagctctgtcccaggagggcccagaagcaacaagcacagccagtgcccaggtcttggttgctaaatcccagtctccagtgagggagggctccctggagaagcagctgggtgcagagctgggacaaggaaaactgaagacatcccaaaataaacaagtgcttaaataaggatagggcacaggagacaatctccaggagctcccaatggccaaagcgtggaaacagtatcagattatgactcacagaatccaacaaacagcccttgcgttcatactgatatataaagaaagaaatcgtaggtcaggcgcagtggctcatgccttttgggaggccaaggcgggcggatcacttgagctcgaaaatttgagaccagcctgagcaacatgggtaaaccccatctctacaaaaaatacaaaaagtcagctgggcatggtggtgagcacctgtggttctggttactcaggaggctgagatgggagatcacgtgagcccgggaggtcgaggctgcagtgagccgtgatcgagccactgcactgcagcctgagccgcagagcaagaccctgtctcaaaaaaaaaaaagggaaaaaagctgaagggactgctctttcttagagatgaattccaattaataaacgtcaaaggaatgaggaaaatgcaaaaatcacctttgaaaactaagttaataattactgcattgcaagacccaccagtggatgctgaaattaattagtgggtaggccgggcacggtggctcacgcctgtaatcctagcaccttgggaggctgaggcaggtggactgcctgagctcaggagttggagaccagcctgggcaacacggtgaaaccccgtctctactaaaaataaaaaaaattacctgggcatggtggcgcgtgcctgtaatcccagctacttgggaggctgagacgggggaattgcttgaacctgggaggcggaggttgcagtgagctgagatggcgccattgcactacagcctcggcaaaagtgagactccatctcaaaaaaaaaaaaaaaagtgggtaaaacttggaagtgaaacagacattcacttagtctggaagtatctccccaaggtatttatggatgacaaagggaaaacagtaactatgtaggggagaagccccggcagccgctgccaccacctgaactaacaggaccaggagttggacagactgacattgcatatctccactatgcattgagaagatgacatcccagctgtggtattcatgccaaaaaataaaataaaccagcagggcgtggtggctcaggcctgtaatcccagcacttttgggaggccaaggcggatggatcatgaggtcaggagttcaagaccagcctggccagcatggtgaaaccttgtctctaataaaaatacaataattagccgggtgtggtggcgggtgcctaaaatcccagctactcaggaggctgaggaaggagaatcgcttgaacctgggaggcagagattgcagtgagctgagatcacaccaccgcactccagcttagaagacagagaaagactccgtctcaaaaaaaaaaaaaaaaacaaaaaacaaaaccttgtccagtcataaggtcagagtccccagtgtgagggacattctacaaaatagctgagagtaccctttaaaagtgtcaaggtcataaaagacaaaagcttctataaatctgaatataaaaataacacttcagaaaattcataaatagagaaataggctgacattaataggctatgttcggtgtggtggctcaggcctgtaattccaacactttgggagaccaaggcaggaggatccctggagcacaagagttcaagaccaacctgggcaacatagtgagaccccatctatacaaagttttaaaaatcagccaggcgcggtggtgggtgtctgtagtcccagctactaaggaggctgaggtgggagatcccttgatcccgggagttccaggatgcagtgagctgtgtttgcgccactgcactctagcctggacatcagagggagaccttgtctcaaaacacaatttttcaaaaatttagttttttaaaaaagatattgagatgctacaatgtccatttcaggaagaatatcatagcacttttgagacaagtttctttttttttttgagacacagtctcgctctgtcacccaggctggagtgcagtggtgcaatcttggctcactgcaagctccgcctcctgggttcacgccattctcctgcctcagcctccccagtagctgggactacaggggcccgccaccacgcctggctaattttttgtatttatagtagagacggggtttcaccatgttagccaggatggtctcgatctcctgactttgtgatctgcctgcctcagcctctcaatgtgccgggattacaggcgtgagccactgcgcccagcctgagacaagtttttctacaaaatgtaatgacattaaggtaatatgaagagacatgatcctcatctttatgtaactggagttcaggtattcattacgctcaacaatatcaaccttttatgatgctattttgttgaatgtgatgaatgccactgataataggacatttaattccatttagaatatctgtatttccaagtaaagtcctaaatctgccagggtggagatttatccatggtaaagtctattcaatccagatataaaaaagatagagattgagggccaggcgcggtggctcacacctgtaatcccagcactttgggaggccgaggtgggcggatcacaaggtcaggagatcaagaccagcctggccaacatggtgagaccctgtctctactaaaaatacaaaaattagctgggcatggcggcacgtgcctgtaatcccagccacttgggaggctgaagcagaagaattgcttgaacggggacccgggaggcagaggctgttgtgagctgagattgcaccactgcactccagcctgggctacagagcgagactctgtctcaaaaaaaaaaaaaaaaaaaaaaaaaaagagagattaaagacatttaaaaaaaagattacaaagaagaaactgcaaagcaaaatcacaatgagatattacttcacacccagtaggatgactaaactaaaaaaggtaagtgttggtgagaatgtggagaaattggaaccctcatacattgctggtagaaatataaaatgctgcagctgctttggaaaagtctggcagttcctcaaaaaattaaacagttacctcatgacccggcaattctactcgagaattgaaaagatgttaatataaaatgtatacaaaaatgttcacagcagcattattcttataaagccacggagtggagacaacccaaatgtccatgaacagatggacaaaaaaaaaatatgcggtatatccatgtcagtagtcggccataaaaaggaacagtcttagacatggtacagcacagatgcaccttaaaaatgctggctggggacaggcgcagtggctcacacctgtaatcccagcactttgggaggctgaggcgggcagatcacgaggtcaggagatagagaccatcctggctaacaaggtggaaccccatctctactaaaaatacaaaaaactagctgggcatggtggctgctgcctgtagtcccagctactcaggaggctgaggcaggagattggcaagaacccaggaggcggagcttgcagtgagccgagatcgcgccactgcactccatcctgggcaacagagcaagactctgcttcaaaaaaaaaaaaaaaaagaaaaagaaaaaaaaaataaccgggcaaggtggcaggtacctgtaatcccagctacttgggagactgaggcaggagaattgcttgaacccaggaggcggaggttgcagtgagccgagattgcgccatggcactccagcccaagtgacaagagtgaaactccatctcaaaaaaaaaaaaaaaagaaaataaaaaaacttgctgggcgtggtggcatgtgcctgtggtcccagctacttgggaggctgaggtgggaagattgcttgagcccaggagtttgcatttacagtaagctatgattgagctaccacactccagcctagagagcaagaccctgtctcttgaaaaaagaaacccggtcgggcgcggtggctcacgcctgtattcccagcactttgggaggccgaggggggcggatcacgaggtcaggagatcgagaccatcctggtgaccacggtgaaaccccgtctctactaaaaatacaaaaaattaagccgggcgtggtggcgggcgcctgtagtcccagctactcgggaggctgaggcaggagaatggcgtgaacctgggaggcggagcttgcagtgagtggagattgcgccactgcactccagcctgtgtgacagaggaagactccgtctcaaaaaaacaaaaacaaaaaaaaccataggctgggcgcagtggctcatgcctgtaatcccagcactttgggaggcccagctgggcggatcatgaggtcaggagatcgagaccatcctggctaacccggtgaaaccccatctctactaaaaatacgaaaaactagctgggcatggtggcgggtgcctgtagtcccagctactcaggaggctgaggcaggagaatcgattcaacccgggaggcggaggttgcagtgaggtgaaatcatgccaccacacacgtctgggaaacaggaacgaaactccatctcaaaagaaaaaaacaaaaaacgaaaaaacaacctctaaaatgaaagactgtatccctagattgctgagaggtaaatgaaatgtatgtagaacatccagcagaggtgcagcctcagacactggctgaccatttgtgcaacctgagagaggcgtgctcttgcagcttgagttccaaccatgccccacactccactcccattaggctacactgcaacctatcacttgtatgtttcctatattagaccatcagttcactgcatgttaagaaccaaaagttaccatttacatgacaactctgttgccaggtacagacatagccatctcatgagatctaaaaggatgtctgagagcaacactgtagccctttaacccacgtgaggctgaacaggattcaatcagctgcccagtgtagactgctccttagatctccgtgcacaccagccagaaaccagagcactgtgggagcgtgtgcacgctcacatccgagaccctctccagggacctcaggctgaagacggagctgggcagaccatgagccaccctggaagagctccaagtcccacaggaatgctgcctctcctgcccggggctggccagttcctactctcagcccatgccggccagggaaagggaccaggaagaacagggcttcccttttctccccaccctgagtgtaatttcgcttgtcgacacttaagtcatgtgtccaacctgggccaatccctgtgctttctttttttgccccgagatggagttgtgctctttttcacccaggctggagtgcgatggcgcgatctcggctcactgcaacctccacctcctgggttcaagcgattctcctgcctcagcctccggagtagctgggattacaggtgcatggcaccatggaaccacaggacagccagaggcagagggggttccccaagtgcccatggggcacaggctgccagttcagtttgtcagccatagctcgctgtctgagcaaagcatcactcagtcaccatgtggggggcagcagggcactgggcagtgtggagtgtccgccctgcaaggccctgtgcccggaggactggcagcacccttcaagaggggaccagacagcccagctggccaaggcctcatgtctacttgctgtctgtgcagtcagtggaagagccctgctcttctttctctcacaagcaccctgctggaacaataaattaaatagtcctctggccttggaagtaaaataaggttttgtgttttatgaataaggaaatgaagattgggtatgatgaggctcagcccagctacctgacctgctgcccaccagaagccccggtggcttccagacccagcctctatcctagttataaatggccagccccacctccaccacaggcacagaatcaggtcattctcctttgaccactcggcagcacctgcctcaatgaccccaccactggccccccagcaaataccagctgttgcttctatgacatcattctctctacttcctttacctccaaccctcccaagaccatgccacatatggacacgacttcgacgtgtccacgtgctatcagctgacaaactggagaggtccggctctaggcaacgctctcctgcgggccagctggtgcctctgcccagcctgtccaatgctgacgcccctcagctggctccttcctggggccttctctccagtgacacctacccacccagttccccaaggcctcatattacttcattcccatgcccctcactcccgagaatgccaggaagtcccaaatcctggtcattcctccctccaaatgcctgttacaccactactgcacaaccaaagcaatgctgcttgtcagtcctgtcatttgtcacaccctgcaggggctgaccacaccagtccatcaggtgccctctccacttcctaagcagcagggagccagtcctagcacggccccagagagcagaccccctgcctggcatgggcctgctcaggccttgctccaacaccgaggcccgggccaagggcacctgcttggggataacctgactctaactcactgcactggtgacattttctgtcacattcacagcgactacagctggggacttagtaatcctttctcctgctagactgggcttctggaagggccaagattagtcatcctgttcatctgggttcctagactgtggccctggctggcattgggcaagctgcttagatggcagctgctgatctgtagtgacatctgtgaccgacagcgaaagaaccacccttagtcacactcccttgcccatgactcagccaggcccatcccagcgtggaagcaagcttagcctgggatgtgtgcccgcaggagccgctggtgcagggaaaggtttctgcagacacggcatgcattcctgtctgtctctccactaccactgcccactgccctgggcttccttacatcccagctgtgggacagtggggtcaggcagaactctggagctcccttgtcccccttcccatctcattctcaaagtgctgtcaccaacccagcatcagggggcacaaggctctctctccactgcccagcttggagtgcagtggcatgataatggctcacagcagcctcaacctccagggctcaagcgatcctcccacctcagcctttagaatagctgagaccacaggagcacgccaccacactcagctaacttttgtatttttagtagagatagggttttgccatgttgcctaggctggtctcgaacttctgggctcaagagatccttctgccctgacctcccaaagtgctgggattacaggtatcaggcgttgccctactcctttttgagacggagttcactcttgttgtccagactggagtgcaatggcacaatctcggctcactgcaacctccacctccctggttcaggcgattctccagcctcagcctcccaagtagctgggattacaggcatgcaccaccacacccagctaattttgtatttttagtagagacggggtttcgccatgttggccaggctggtcttgaactcctgacctcaggtgatctgcctgccccagcctcccaaagtgctgggattacaggcgtgagccaccgcgcccagccgccccactcttaaatggacggattatcacagcttccaccagccacttcatcaaatatacaactaagagaggatcctcatgccttgctccgtggcaaggttaaaaacaacaacaaaaaaacaaacagaaaaaggaattacactacaaagtcaaaactgctgaatccacgtttctctgaaaaccagagtacaagaaggaaaggaacagcccagagatgttctggctgtgggaagcctgtggacggcacacagggcagccatcccaccccaacctcccctcacctggaggcacaggcacaagggtcaacaggtggctcccgggcaaaggtgtcctcccacctggtgagttagagaggaaggtgttaggtgtgaggcaggaaagaagataagaaagaagacaggcagcttcggccctccaggagcggggaccccccgccacccccacaacccatgccaacttcaggtgtccaacaccagatggggctgctccctccatccccaactcaggttctcccaccccctcccagctggacagacaccaaaatcctggcccaggcctggactccaacagtgggacgaatcaaacagttccagttctacacacatttctattttattatggaaaaggtggaaacgccaccttctccacaacagcaaccagtaaaatttatcccaaaaataactcggtacaaaacaggtctgtttcagaattaaaaaaaaaaaaaaagaaaaaaaaaaaacctttacatgagtttttaaatcctattttaaaacataaaagaaacaaatccatcattggccgcacagccccagccaccgccccccaaccagggagcaagaggagacgcctgggtcctgttccgcacgcggatttgctggtctgtttaactggtgtccatctgaaacacagaggagaaagaggcttgcattcacaggcggcctgctccccactgcggctttgaccaggcccccagctggctcccccgggactcactctcgcattataggcgtccagctgggcatccagctcctctgccgaaagctgctgctttgaattcctgccggcacctctgcctcttccacgggcgcctccgcgggtgcctctccgggtgcctccaccaccaccaaaacctccagcgccacggtttctagtcatgccacctctgtttacgctagcaaggaagacgaaaccgttcacacacccggaaggaccctaagagcgacgcagcctcaccctcggccaatccccttccccagaggccccggaagtcacctctgtgcaggcctccgctgtgcgtcaatctgtgacgtgacaagctgaatgttcatggggcggcctgcggcaaagaatacgagaaggcacgttctattgagaggctctgaaacccacccagctggcgccacaccctggtctccatgcaaacactggaaagggcctctgtgcgtctcaaatgcccccgacaagggaaatggcctggagatactggtgggagaacaaaatggcaaggaagcaaccccaccaacacctcctcactccttctcagtccagactaggtgggctgctcgctgaggtatcggggtgctcgtgggtggagaggtgtgggtgacctgacgaagaagaaccggtacctttgtctttacgactacagccccgcactcagaggtgtactatggcggttctgagaaggcttcacagaagtgaatcttccggaaggagctgaaggaggggagggatgtagcttgctggatgggggttcacaagaggttggtccagatgtgtggggcagcatgagaggtggcagatggaagagagagacaaaggggcaaatgcaaagtgtcctcagccacaggggtaccccatattcctacctggacaggtgccagccccaaactccacaagccccacagtcagcgtgggtccacccccagactcaccatccagagggacgccgttgtactgcttcatggccttcagggcatctgccttccgctcaaagtgcacgtctgctgttcctaagctgcgaccagagcgatcatagtgcacagccgccttcttcagcgttccaaattcagcaaagagttcctgggagttgcagagagcagttgtcagaaaagcaacaaaactgcgttccttctggtggcccagggacaggccctggaagcgtgagttgctttgggggtggttctctgggaggcaggacagtggttaacgggaaatgagggaagggcggggcaggagggacagcaacttccaagagcacctgggtctgagggctcctgccattgtggggacctgacacgtgtaccacgatgcaggtagaggaagctgcaaagcccactagcaacgggcacaaaattaagccactatcctcttcaacaaaggaaaatgtacaacacacccaagggctgttccaagaaacggtaaaggccaaaatcaagagcaagggaagcagtccgatatcagaccagcttgaagggcctgtagattcgggagccctgaccccagcccctcccccaaaggcagattctggctcacctttccctctcctcctactcaagcctgcggcaaagtctgaagtcaagcgctgtcatggaaactgccctgacctcaggcaggctgggagttggagagggaacccagagtgtggggatactccggccgcaggcacacagcgggaactggagttcaccaaaagcggtttccagtggatgctagaaaccaccttaaaaaaagtgttgagacactgtgagtgctcactggccctactctgtcctcccaaggcaaatggctgggctgtgggcaactgaaccctgcccagccatctccaaaactgattcccaaaaagtcatttcttaaccagaaaacaagttgaaatgccattgggattcaatttttctttttttaaaaaagaaaagcttcaaccaaagatggatttgagagtcatgtcactgacgggacacggcggtggggagtgataaaaccacagcgtacaaggtctttataagacagtactcaaggcaaacagagccagaaaaacagactccctgtgcttcacaagatacataaagaagattctttttctcacattaacccactaagacaggcacaaaatttaaaaagcaactgggctgggtctaacagccaaaaaccactcacatttggtcagtctttgtccctgttagaaactggaagccctggcaggggattttcactcacagaacccatcttcagactaacagcagcagttcctcaggctcagctaggctcgcacctgcctgcgcactgaccccggctttactagcactgggtctgtcctgcagcccttcagagctgggagggctcccttcgctaaggcgggaaggggactcagggccacatccccaaaatcacgatccgtcctgtgcagggcgaacggctcaccgagaagccctcgtctcttacctgaatatcggcgtctgagactccaaaatccagattggacaccagcagtttcccacctgtctccacgccggcaccaccgccgaagccactgtcgaaaagatcgtgctgccacttgtcgggaagttgttttggctgaaaaaaaaaccgcaacaagagcagatctgtgagtctcagtccagggctttcctgaccctcacggctactccggacccttcctcttcccggcctgagaggatccggccgaaacggggccgccagcgctccctccggcgctgcagctgccccagcccgaggccgcacggtcccaccgcggccgcacaacttcagttcccttagactaacttcccgccgcctgtgccgcgcccagcgtcccctcctctcctgccacgaggccccaacgtccggaacaaacaaagagctgggaagggtctcagcctccgggaccggaccccgaaagaacgacctcgctcccgcccaccaccccctccgcgcccacacgcaccctccggacctccgggcggccgctccaccagccttatccacccgccggcccgggtctccgccgcgagcggccccggccccagccccggctggccccctcccactctccggcgcggccggcctccgcactcaccctgctgtagggcgccggtcggttcctgccgcctccgccggccgcgccgcgggcgatggccggccggttccggatgggcccgccgcctcgattcactcgcgcggcggcctgcgccccaccgccgcggccgccctgggagccggcccggccgcggccccggcccccgccccggccgcctcgctggctccggttcagtttaatgatgtcgtccagagacatgtccattttgtcggccatggcgggcgcggaatcgggcatcggctcgagcccgcgcgtcagcacgccggcacgtcacttccggcgccgcgtgaggccttccggtgccacggcctcggagcggctgctgattggccgctggcggacggctgcgcgcgcgggacggggtgaggcggggaggcgcgtgcgcactggcgtgcgagactcggcgggcgctgttgagggagtcgggccgcgactgtggtcgtttttataccttcccgcgcggacgccggcgctgccaacggaagggcgggtagggcggtgcgtgattaggttggcgaaggtgcgagggcgcagggggtggggcggcggccgttggaggcggagcctacgcgcccctccctccccgcacgctccgcccgatcggccagggctgggggcgctgggggcgctacgggcgcggcgggtgcctgggagctgctgggagtccttgtttccgctcccgcccaggactgtgcgctcggctcgcggtggggtccggcgggcgcggcttcggcgggcggcagccgctgcagacgagctgcgggttggttttttggtctccacctgcagcccccccaagtctgcactgtcacattttgccagtcatatcctttacaagttttcttgcgggccgggcgcgggcctcacgcctgtaatcccagcactttgggaggccgaggcaagaggttcgcttcagcccaggagtttgagaccagccggggcaacatcgtgagacccccatctctaaaaaaaaaaatgagctgggcatggtggtgcacttctgtactaccagctacttgggaggccgaggtgggaggattgcttgagcccaggaggtcgaggctgcagtgagccgtggtggcaccactgcactccagcctgggcgacagagccagaccctgtctccaaaaaaaaattatttttgcaacttattaatgaaaaccagtgtgccatttcattgattttttttttttttttttgaggcagtctcattctgtcgcccaggctggagtgcagtggggcgatctcggctcactgcaacctctgcctcctgggttcaagcgagtctccagcggcagcctcccgagtagctgggactacaggcacgtgccaccatacctggctaatgtttgtatttttaatagagacagggtttcgccatgttggccagggtggtcttgaactcctgacctcagatgatccgcccgccttggcctcccaaagtgctgggattacaggcatgagccaccacacccagcccatttcatggattttaagttgttttgagatacttgcttttgtttttgttttttgagtcagggtctccctccgtcacccagagtggagtgcagtggtgtgatcttggctcactgcagcctcaaactcctgggctcgagctatcctcccacgtcagcctctcaggcagctggtgcacgccaccacagctggcttttttttttttttttgagacagtcccactatgttgcccaggctggagtgcagtggtgcgatctcggctcactgcaatctctgcctcccaggtccaagtgattcctgtggctcagcttcccgaatagagctgggagctggcgtgatctcagctcgctgcaacctccgcctcccaggttcaagtgattctcttgcctcaccctcccgagtagctgggattacagttgcccaccaccacacccggctaattttttgtatttttagtagagacagggtttcagtatgttggccaggctggtcttgaactcctgaccttgtgatctgcctgcctcagcctcccaaagtgctgggattacaggcgtgagccactacgcctggcctctaatttttgtttttttggtagagatggggtttcaccatgttggccaggttggtctcgaactcctgacctcaagtgatccaccctcctcggcctcccaaagtgctgggattacaagcatgagccaccacctgcggctaatttttttgtattttttgtagagacggagtttcgtcatgttggccaggcccatttgagatctttgaagatatcctcaacgtgaggtaaaaccaaactcctgactgtcctgtgctcccaaatgtgatctccttgtccgtaaggagctgagtcccttcccttggagagaagagtgtgccctttctctagatggctaaagaaacctcacagatagttcttttttttcctttttttttttttttttttttggtagagactcagtctcactgtgttacacaggctggtctcaaactcctgagctcaggcgatcctcccgagttggcctcccagagtgctgggatcacaggtgtgagccacaaagcggattgctgctggggcttgctgttctcccgtagctcccctgcagccctgaccctctgggcccagagccctttacttgttatttgttttaatagaaacggggctcatagcagggcataggggttcacgcctgtaatcccagcactttgggaggccgcagtggcagatcgcttgaggccaggagttcaagaccagcctggcctacatggtgaaacctcgactactaaaaatacaaaaattagtcgggcgtggagtcacgtgcctatagcctcagctactcaggaggccgaagcacaagaaatgagctgagatcatgccactgcactacagcctgggtgacagagtgagactctgtctcaaaaaaaaaaaattaataaaaataaaagtaaaataaaatagaaacagggctcacgatgtttcccaggctgggttcggactcctgggccggtatgatcttcctgccttggccccctgagtagctgggactgcactgtggcaggcttatacctgtgttggtgcctaaacgttctagctctgcagactcaatttagccagtcgtcctgttccctccgccgcaggctctgctgccatgaaggtgaagattaagtgctggaacggcgtggccacttggctctgggtggccaacgatgagaactgtggcatctgcaggatggcatttaacggatgctgccctgactgtgagtgtcccctccatgctgtctgagcggccccgactgtgagtgtcccctctgtgctgtctgctgcctgctggactagcctcagtagctcctgttaaatacctgcacgaaatacccagtttcattttctttttttttttttttttttgagaccgagtttcgatcttgtttcccaggctggagtgcaatggcgcgatctcggcttgccgcaacctctgcctcccgggttcaaacggttctcctgcctcagccttccaagcagctgggattacaggcatgtgccaccatgctgggctaatttttttatttttagtagagacggggttttgccttgttggctaggctggccttgaactcctgacctcaggtgacctgcccgcttcagccttccaaagtgctgggattacaggtgtgagccactttgcctggcccacatttttattttcttttctttctttcttttctttttttttttttttttttttgagatggagtttcactcttgttgcccaggctggagtgcaatggcgcgatctcggctcactgcaacctccgcctcctgggctcaagcgattctcctgcctcagccttccaagtacctgggatcacaggcatgtgccactacacccggctaattttgtattttttagtagagacaggctttctccatgttaggctggtctcgaactgtcaacctcaggtgatccacccgcctcagcctcccaaagggatgggattacaggcgcgaaccaccgtgccccccccaacattttcattttcatctcatgaagaaaagttgatagaaaaaaagccaggtggttggtacccatgtttatataaagatcctgtcacagactccataggatgaaactcagctgtgaaatacgtgggattaaaaagagattagagtctgggcgggcagatcacaaggtcaagagatggaggccggcatggcggcccacgcctgttattccagcactgtgggaggccgaggcgggcggatcacaaggtcaagagatggaggccggcacggtggctcacacctgtcatcctagcactgtgggaggccaaggtaggcagatcacagggtcaagagatcaaggcagggtgtggtggcccacacttgtcatcccagcactgtgggaggctgaagtggatggatctcaaggtcaggagattgagaccatcctggccaacatagtgaaacgccatctctactaaaaatacaaaaattagctgggtgtgtggcgtgtgcctgtaatcccagctactggggaggctgaggcaggagaatctcttgagcctgggagacgggggttgcagtgagccaagagcaagactccatctcaaaaaacaaacaaaaaaaagattagtttaaactttttatttgaaaattctcaaaattgaatggcataggccaggcgcagtggctcacacctgtaatcccaccactttgggaggccaaggcaggcggattgcttcaggccaggtgttcgagaccagcctggccaacatggcaaaaccccgactctactaaaaatccaaaaaaattagccgggcatggtggcaggtgcctgtaatcccagcactttgggaggccgaggtggatggatcacctgaggtcaggagtttgagaccagcctggccaacatggtaaaatcccgtctctactaaaaatacaaaaaagtagccgggcatggtggtgcatgcctgtaatcccagctactcaggaggctgaggcaaaagaatcgcttgaacctgggaggcagatgttgtggtgagccaagatcgcaccattgcactccagcctgggcaacaagagtgaaactccatctcaaaaaaaaagaaaaaaagtggaaatgtttgattatgtttaggttgaaagcagagttttgcatcagcgaaatggtttttcatgagaccgaaatgagcgtaaagcagaagcaagggtcaaggttttgcccagggaggacaagaagaactccccagaggacagtggggaatggagaggacagtggggaatggggaggaccgagaagctactcactaccccaagtaaccaggcgtatttttgtagggccaggtgcatgcccatattgattgacagggtctcactgtgttgcccaagctggacgtgaactcctgggctccagccatcctactgtctcagcctcccaagtagcataccaccacactcatctgcctcctttgcttttttttttttttttttttttttttttttttgagatagagtcttgccctgttgctcagactggagtgcaatggcaccatctcagctcaccgcaacccccacccttctgagttcaaaggattctccggcctcagcctcccaagtagctgggattacaggcatgcaccaccacagccagctaatttgttgtatttttatttttatttatttatttattttcgagacagagtctcactctgtcaccagggctggagtgcagtggcacgatcttggctcactgcaacttccgcctccctagttcaagtgattctcctgcctcagctttccgaatagctgggactacaggcgctcgccgccatgcccagctaatttttgtagttttaacagaaatggggtttcaccatgttggccaggatggtctcgatctcttgacctcgtgatccgcccacctcagcctcccaaagtgctgggattacaggcatgagccactgcgcccagcccttgttgtatttttagcagagacagggtttcaccatgttggccgggctggtcttaaaactcctgacctcaggtgatccgtccacctcggcctcccaaagtaccaggattacaggtgtgagccactgcacccgcccctgtctttgcttcttaaggtgaaattgagatgactgaatcttagtacaattttttttttttgagacagggtcttgctgtcacccaggcggcagtgcagtgtggcaaaatcatagctcactgtagccttcaattcctcagctcaagtgatcctcccacctccacctctcaagtagctgggaccacaggcatgctccacaatgcctggctaattttttatttttttattttttgtagagacagggttttgctatgttgccaaggctagtcttgaactcctgggctcaagggatctgcctgccttggcataccaaagtgctgggattacagacgtgagccaccatgcctgaacaaaactacataaatttttaattttttttgtggaaatggagtctcactatgtttcccaggctggtctcaaactcttggctctgtcctgccacagcctcccaaagtgctgggattataggtgtggcgcctggcccgtacaaatactttttattctaggcttaacttttacattggccctagctaaatagaaatctcatcactcaggaattaatcctcatttaatcaaacgggtagggtgtaatcttaggaaattattgattgactctacctgattggatttgtagttaatagctaattaggttaataactaaattcacaaggcacagttttatttgatctcttttaaattgctcttaaggatgtaacaaagagtgcgtgggatgccctgagggcaggcattcgacttctggagcagcagcttaacttctgaaattcctccgaaccatgtgtccacacctcgtctggctgcatccgtgggccagatgtgggtggtgaatcctgtggattagaggtggtgctaggtagcccccaagtgactgcagtggtgggtccacaggcagcctgcagagcccgccctgcagcatgccagctgggcctgtgatggggcatccagagggtgttgccctgaacactcagcatgtctccgctgacacagtgtgctcaggctttgttaacatggggcctgttggctgcagagactcaggagttgagagtctaatttttggacctgctgatggttaagtcatagtgagtcagtgttaacgcgcaaagcgtttgacgagtccaatgtgcttccatactaagcagcaccaggtttcttttgctaaaattgaactcctgtgaaaaattcagagtgactaagttcattcaacaaagaccgtgggagcccgaggctggtaaacaatgagtccatcccgcatcccaggggactctggtggcagtgcagttttgccgagaggagttttaatttaaaaaaatgcaatcaggagaccagcaggtcctggaatgagtcaccctcagtgcatctgcggactcatcagacaccccaggccggcttcgggtggggaatgcactagaacgaagtgacacctttgactaaacgaggcctcccccgagtactcagagtggcccagacccctctcctcagggggctagcaggcttcagctctcatttgaaagggccgatatcaagcagagttgtgctgaggccagaaacccccacgggcaggtcctcccagggctgggagtgggcatgccgtggggccggcgctgccaggacaggagggtggccacgagctccagctccacaatgccaggccgaccctgccgtggggctggggctgggacttgctgtgctctgttggcagcagctgttcctcaggggtttccaggctcttggagatcagggacactcatttctcttgatcatggctgatacaagcatccctctctgtgtcaggtcctctccatggagaaagcatttctaggtgtttgggctggtgcccgcagcctgtgcctgtcctgggaggcagggcccatccacaggtgcccatcaacacagcttccccaacgcctgggcagcacaccggatccctgatgtctagggaagagtcttctaggtccccagaccccacccctcctgcccttgatcaagagaccagttcactactcagatgcacgtctccttggtgccttgaccattcatgtgacctttttggcatcacagatcaagtgtctgcagatgggcccagggcctgtaggtcagacattgccctttttccccagcctcaagcacaggggacacagggtgggctaggccagagcgccacctcctcagagaggcccctgggctccccactgagcatgatgagcctgggtgaggggaggcgcctgctgcggttgccccgggtggaggccgcatgtccggtgtcccttggtcattgctggtcttcgcctgggggcgggctggtcaggagaccgattgggtaacactcctgatttcggcttctctgaaacatgagaggctgcagtgctggagccactgcccagggtccctacctgcacccctgcctggcttgtcacatgctctgtgtccagcctggtcatgcctgtccttttccccacctcccctccgtaggcaaggtgcccggcgacgactgcccgctggtgtggggccagtgctcccactgcttccacatgcattgcatcctcaagtggctgcacgcacagcaggtgcagcagcactgccccatgtgccgccaggaatggaagttcaaggagtgaggcccgacctggctctcgctggaggggcatcctgagactccttcctcatgctggcgccgatggctgctggggacagcgcccctgagctgcaacaaggtggaaacaagggctggagctgcgtttgttttgccatcactatgttgacacttttatccaataagtgaaaactcattaaactactcaaatcttgctggaggcctctgggtgcctgtgttctcggcatatagatgtggtctcggtgtgttttgatatgaaaactctcatgaataaacatctccgtgaaacgccaaggccctcgtcaaaccctgagtcatgactgggaggagaaggagcaggatcagacggtagagcctggggcatgctcttcaggcatgctcttgcctgctggattgccggcggcggccctgggaccctccctcaggctggctctgagggaccctggctgtgcaaagctggcggccactgcttgtggcgcctccagactgaaggccaccatctctgagtgggcgtccattgttctcactgggactgtctgcagcggggctgggcctcccacagtgtagggatcagtgtcctgacactgggaagtgtgtccacacgtctgaggcttcccttcctagggaaaggtggccctgggaggctcctttgtgtgcctctgctccccacaatcgtggtgggaaggggccgctgggggagtggcagccccggcatctcaggctgcttctggacagagcacaggctgtgtctccagtaacctagggagcccttggcattcatggggccagtgacccgtgcccagtgtctcttgacccttcctcacagcaacctgaggagtagaccaggcctcacctgaaatctgtgtcagggttctctagagagacaggactctatatgaagagtatatatgaagagtttattgggagtattgactcacgtgatcacaaggtgaagtcccacaataagccatgtgcaaggtgaggagcaaggaagccagtctgagtcccaaaacaaaagtagagaagccgatagtgcagccttcatcctgtggccaaaggctgcagagcccctggcaagccactggtgtaggtccgagagtccaaaagctgaagaacctggaggccgacgtgcgagggcgggaagcatccagcatgggagaaagatggaggccagattcagccagtctagtctttccacgttcctctgcctgcttgtatcctggctgtgctggcagccgattaggtggtgcccacctggattgagggtgggtctgcctctcccagcccactgactcaaatgggaatctcctctggcaacaccctcacagacacacccagtgacaatactttgcatccttcaatccagtcaagctgacactcagcattcaccatcacacctgggaagcatggaacccagaaacaagtgccagggctccagtgccagtgcctgtcctgggaagatacccaagagaagacatgaccaggaccttgggggagcatgaaatggtgagggcacagtgagcttgaaggctgatgtcacctgccaggagagcggctggcagtcctgcctggtgccccccaaggggcagagctggcagagaggggcctccaatcgaaggccaggagtcgtggagctccagtgccttggtgtggctggccttcttgcccccctcccagaggaccccgccagtaacagccctgctggtggaaccttccccagtgggcatgaaagaaatgagggccccacaagccacatggactctgatgcctggagccaagaataccccttagggtggtagaaaccgcccccggggcactgtgcagtgtggctggctctccagcatcaggagtactggggattgcctgggggacgactcctagggctgggcgcccgtgggccctcccctgctgccactgcggcccacgcaagccgggcctgaagggcgcgagcggcatgggtggggagcttgagggggcgttgggctcccaccaagcgccagatccttgcgcgcctccagcgctcgcccgcgcggctggttcctttgggatgcggaggtgcgacggctcctccgcgcgcgcccgctgcaccccagcccgcccgccgcccctcccggccctccgcagcctcggcccgccctcgccgcagatataaggcggcccaggcggtggctgctccgagcccggacgccgccgcccaccagtcagccggcgtccccatggcccggtccgcgacactggcggccgccgccctggcgctgtgcctgctgctggcgccgcctggcctcgcgtggtacaagccagcggcggggcacagctcctactcggtgggccgcgccgcggggctgctgtccggcctccgcaggtccccgtacgcgcggcgctcccagccctacagaggggcggaacccccgggcggggccggcgcctccccggagctgcaactgcaccccaggctgcggagcctcgtgagtccggcgtgccggggactgatggggggcggcggcaggacgtgggtgggggtgcggcggcccctcagcctttgcttgcctgccccccaggctgtgtgcgtccaggacgtcgccccaaacctgcagaggtgcgagcggctccccgacggccgcgggacctaccagtgcaaggcgaacgtcttcctgtccctgcgcgcagccgactgcctcgccgcctgagcccggacctctcctggcaccgctgggggccccccgcccccaccgtcccactcggtgaccccaggcccctccggcgcgggatggcgccccaggtctcccctactccgctcaccccgcagttaatggcaaacgaataaataaatgaggcggcctcggagtgaggggtgctggaggactggcagccaggccacgaggggaacgggacctggaaatccccaagcctgggtatgagaaggcagccgagtgtgcggcggcagggcaaggttggcctgggccgcccagaggtcttcagacccaggggcgaagctggccacgacccagccccgcggtgaagccgcgcctagccttggtgctccctgggggaagtgcagggccacggctggcccggttcccagtgtcctcccccagcccttcgctccccaactcgagagccaaatctgtgagggcatgggctggagcccctggctgccttcctcttgcccccatcccttctggccaggccaagtccgagggtgcaggggcaaggaggagagttgggggcctgagccctggctccagaggcccagagcatgcctccccagagctgaaggtgggagatgggtaggttctccctccgccgttgggtgtgactccggaactggcttgggctctggcctccaatgctgctacggggccaggcccacctccgggcccaggcagcagcactgcagggcctttctaccctccccaagcctggggcccaggcagcccctgtccagcaccaatctgtctatggggaactggctggtccctctgctcaggggaccccgcagtccagggttctgagtgggagcattggcaccaccccactcctgaaagcgggggcctggcaggatgaggatggcctgtgccccccacaccttggcccctggctcggagagcagggtgacaggctgccttcctgggctgtggagagcctcgcgtgcacctcgcctccagctcctgtgctgggtcgtgaggtcgacctcacaacagcagaggacaggcccatggggtgccacatgggccaggtgctgtagggcagaggccattctggagaggaatgtggggctgaaaaaagtactgatcataagcctcattttgaatgcggcgagaccaggcaatctatggcctccctagacacctcccggaggctgcagtaagaacctcttcggcctctgggctgctccaggcgggccgtgacaggggtgtgggagacagagatcccatggcccctggaggggccaaggggcaaggagcctcagctctggctctcctccttattctagcatcgcctgctacagggggtggccccaggctttggagggctggaggcctgggtttcactcactgccaggctgcccgctgcactcccggctgctgggtgcatggtgggggcagggccaagagggtctccttgctgagtggttccctggtccttcccagcagggctgggagccccgcgcagcactgccaccaggctttattcggttgtaccaaagagatttccgtcagccatgtacaaacagaacagagtccataaggagagtggcgaagctgccgggaaggaaggcaagcgtgttttcctggagccaggcgctgggtggcaggacaccgtgttggggggtgcccagtgggaggtggtgtggtctacacccagagaactaaaggggtgaccgcagtcactgctccctaaagccctctgctctgcacctcccgccacagctgggtgggcagtcagtgtggcctctgtccaggtggtgggggcatccggggaccaggtgggggcgcacgcaggagcggtgcgtttcaggctgcaggtgccgtctgcccgtctcacttccggcctctccactgtgctggacaccctctctgagcagctttgctggaaagagcggagagcctgctgcaaaccaggcaccttgtaggcaggcaaggaggcagagtcctcaccagcccttccagagccaggccagttagagagggcggccctgcagagtcctatgtccaaacgcagaaggcgcagaagcagagcagggggagggccggccagggcctctgccaggttagaagtcaccatcgcgctcccccaggggctgtgccgcctgctgcctggcagcctccaggaaggccagctccttggcttccttcttctggtttcgcgcctcatactccaacctgagagggcagggtaagtctagcagagagcgcccatgaggcggctccgagggggagggcacggtaagtctagcggagagcgcccatgaggcggctccgaggtgcccccacccaactgcacctgttggtgatgatccgctggacgatgaggtctgtggtgaggttgctgccactgtcaatctgacggaagatgccccttctcttgggctcctgggggtccagagaggaggagcgggatgaaggtccctgctgacctccccaagacccatctgatgccctgccccagagggagaccagcgcccagggtcccatgggagtggtgcagtcggagcagctgcgccaccatgcccgtttcccaggcaggcacagtgagtcattaaatggctgggaggtgccaatggcaacccctgtgcccagcaagggccagcatgacccacctggtatgggtcggagccatccctgtcagggataatttctgtcttgccgtgacacaccaggtccacctggagaaggagtggggtcaggagccctccccggggaggcagcggccgtcgccacccacagcccagcacaggccccgggggttgggagagctgaccctgccctttcctcagcccaggtacctcctgggccccgcctaggagcccacagccagcctgcattcccagcccatgcaggaacagaggtgaacagagggaacgaggtgagcccatgcggagcctcaccttgaagtgacttaggagctctgctgtgaccgcgtacggggctccaatcaccacttctgacacgtactgtggggacagtgggggcagaaagacttgctcggtccctgctactggtaagccagggccacagggtggtgagagacggctcagacatggggcggggctgccagtgagtagcagggatgggctgggcaggctggggacccctggggctcctccatgagacaagaaggaacagcatctggagacctgaccacccctcctcatgcctcaacaaacaggtatgggcaggtgccacagaactcggggtgctgggtgcagctctgccagtgacccaagcccccctgccctggctcagggaggcccttagtaggggggatgttgtgggaatgtctccccatccttgggctggctcctggcccccactcacccggcaggccagcacgctcagagtccgttcatgcagattcatgatggggtagttcttccccttgtagtgattgacctcctgcggccagagtgcggctagctcagcccggagactttttggggggacagggtgtgcccctcccggctgtccctcatgggaagaagtcggggaggttgctcgcccttgtggggatgccccagacaggacagccctggaccccagaagcctacgatcaccccccagggtctcctgtgacttcacctggggccccttcccagagaccacctgcacctaacagcaacgcttagggcccctcgagggcccatcagctgcccaggggcccagggagcaagaaggcagtgacctggtcaaagtgtaagcccgcgatgatgtagggcctctctgccagcctgtgcaccttctccaggaagtccacatgcccgatgtctgcacccaggttaagaagcagtcgggatggggatgacagggagcagctccctgacagctcatgcccaagggcctccccgccatcctccctgctgacagctgctcccctgcaaaccagccagcccagtctgggggccccaaggagtcaagtgaggcccccgggtcccaccccatgtggcacatgtaggggagcagcagaggcccagaggatacggaacaggtcgaaggcaccagccacatagatgactgtctcccctggctggggctccttcccagaagcaaactggatgatcttctgagatgtctgcaggaactgggataccccggtccaggggttccgcccaccagggcactgcaagccaagagagggagcaggttggcgggggaggcctcccaggtgctgccctcaccaggtcaccaaaccctcagctgtcacctgccagcaatcccatttccagccagtcatctcgggcaggggacacactgccaggccaggtggcaggtgggactgtggcgccaccccacaaccacagcaggcaccgcagcagacaccacttcagcccagcaagcgaccaccaggaggaggcaaggagccctgtggcaggtgcacacagcccttgggagggacctggtaccctgagaccactgtctggtcacctgggagcagccttctgaggaaagtatgtccccggcgggtatcgggtgagggggctacaatgggagagagggccaggccacttggttagaggccacctgtccacaggcaaatccttgctcctccaagcagtggctgccgtgaccggccagccggtgccaccacccgcctgccctccctcccagcatccaccagtgagccaaacctggcagtcagtgcctggtcagtgccagggacagagggaggagggtgaggctctgggctggcctttccccaagggatggctgggacaggtggccgggggagccccctgcagctgcgtgctcagctctccctgcacagccgcactcaccttgccaaaactgtctgcatactcccggtactcagaggacatctcctgcacagaaggtcagagcagggctgaggggcctgccctcccggcgtggccaccccagaaccggctggggatggggagcagtgggcaggaggaccctgagagggcagggaggtgcccctcctttcccctggagacctcgacccaggggcctcggggattccgccgccgactcacctggctgctgtgatgggctttggttaccagcagcatgcggcccacgaggtctgtggtggacaccccttgcgtgcgcttgcattctctgggggacacagtgggagtggggtctcatcctgggacactcgcaaggctctgcctcctgctaccaccactagggacactagcagccctgctgtggcagaacccacggctgccccaaagactgagggtccccttcctgtgcaaggccataacagaaaacctgggttgggaacatggggaaggcctccacgcttttattgactgaagggagtggcaggagcacagaaaaggacccttgctggggcccaggtgtgcaatgccagggagaggatgggcactggggtagcagctctgcttcctgcctccctcacacccacgtcctgcccgctgagcatctgcagctgagtgaattctcagctgcagcatctcatgcgggagccactggcctcatgtccctgacgtctggtaattcagatatagtgccagctccccagcagtgccagccacgtcccccgagctcaacagctgccacctcacaaagctgtgcctttggagccctggggccatgggtctgcagcaccaaatggcaagggcctccaggccaccccacaatggcacctccatccctcgagttcccagtcctgggcgtgaggaacatggcccagggcctggacgctcccctcacgggctcccggtaaatagcaaagcacgagccaggagggagccccgtgtccagctccctggatggccaggcccgcggtggagactcacctgtacctcccagcctgctttacttcctcataggtgtcccggccatctacagtcagggtgatgtcatctaagcagtgacacacaaggacaaggatccttaacccaaagccaccagaaccttcagagcccaggaccctctcggcccctggcctgccctagtgtccgcgtgcccatttctaggtgggggcccggaaatgtctcagatcctcaaagggcggaggccccctgttcccggatgtcccaccagcagatctgatcctgagccacctgatgtccccaggcccccaggtcccagccccgccactcactgccgtgaacacagaagtcacagttgtatttgtccagggtctctagtgtagtgacgtagggagccgctggcaccacctcgtccacccatttgatggcctgcaccatcttgtatctctcctcctgagtgaacaccgggggccccttgtgcttggcgatctcctctaggaaaaggacaacggggagactggggaccccagcccacccggcccctccagtaggaggccccttcccagcacccagctgtagccacacaagagggccggtgggggcaggctgtctctctaccctggcccttagcccactagtgctggccaactgggtggctctcttccctgcgagggtctcaggcaaaggcagagattccttctgacgagcaggtgctcagcccctgaaggcttgggagcctcgctggcagtggtggggagcaggtgccccttctctttagctgggacaggaaatgcaagatgggaaaggcattaggccatcctcagctggggctgggctgggtgagcctacagtgccctcccctacagctgtgccctggcaaggtggccccaggcctgcaggctttcagtcaacagtcgcaacccacaggagggctggggggccgcgggtgggcgaggccatctgtgcttaccatcggtgtgcacgcctacgatgaggtagtcacccatggcccgtgcctggcgcagctggttggagtggccgtaatgcaccatgtcatagctgtggagacagagagagtgggtggtccctgtgccaagggtggggaccaggtgtccctgtgggttaggggcagagctttgctcctctgaggactccttaggaagcgctctgagaagctgctgctgggagccctgggactgggattcggaggatgtaggtgctcagctctccaccccactggctcctgggcctgacggtgggacccctgtgccagatctagaaagggtggcaggggcagagatgtcaaggcctggctgggtctagaggactggtgggtgcaggacagactggagcccactgaaagctgcagggccacgtgtcctatcccctcaccaaatatcaactgccctgggcagtcactttaaaataagccgatgttaactcttggggtagggttggatcctagactaccttgagacaagcaaacagtccctggggctaacccaaaacaaatccaaccacaaaataaaaccctgggaatcactggccctgaaaatcctgtctctcctcccttacggcctcaagctcagcaggcttaacgctaagggtgaacagccactgccttgccacctggctcgagagttttcattcacaaatctaggtctgctaacacgtgaactctcaagcccaaagctacacagccctgccaccaactgggcctcgctgccctggcttcttcgccacttctttacagcagcggcccatcccctcaagtggacaaagctgtccctgcctctccagggagaggtgtgaccctggcagcccacacagtgcacagagttgctccactgcacaccactgcttcctcccagcacccctgccacagtgcgcggagcccggcagacatgctgggtaaaatctggcgggcccatgtacccactggacaggctggaggggaggagggggcagaggctgggccaggggagcacagtctggaatggggctggggcctggtcagggcaaggtcaaagtccactgacacaaagccacattccttttcccagaggtgactcggacacagaagacaaggccctgcttgctctcctgggaagggctaatcagatagaggcgcttgcttcctggattccatccggcaggcacgtgaaagggtcagaggtagcaaattatcagtaacggtcgtcttcctttcacttgttgacaacccgaaacttttcttaaaacaatgccctctgactggccagggaagaccgatcgcattctagccccgcggaggaggacccgggagcccgcgggcttcaccgcgggtcccggacaggcaggtcgcacccgatgcccacctacagggacgctcgcccggaggccaggggaacccctggaccggagccgggcaagctggttgctggtggttacggagaagcagggaggccgtggctccagatctcagcgcggtggctgcaccggagaggtcggcgtgaccgggcggggcctccgccagaggtagacggggtcgcccacggcagggcgcggagcctctgcagcccgaccctcccggcaggcgagccccgcagcctgccagccccggcccatgccggacgaggacgccacccagaacgcgggcccggtccccgggcaacggctggcgcggcgccccggaaggaagccggccccggcgcccccgcggcccgccccggccccgcgctcaccagccatcgcaccacaccctcacggcgcgcctgccccccgggcccggctgctctgcgccgcctgcagccccgcgcccgttccggatcatggccccgcagcggcggcgcggacagcctggcagctcccggcgactccgagcgccgccgcccgccccgccaggcgcacgctcagcggccgtcacgcgggcctcacccgctgcgcacggccaatggcgtgcgccgctcggcccgagccccgcccccgcctcccccgccccgcctcccgccctccgccccgagccccaccccccgaaggccgcgccccaccgcacctccgcgcacggccaatggcgtgagcccctgacagagtcccgccccctccaaacgcacagccaatggcgtgtgccgcgctttccgagccccgccccccgacccacacctggcctctccgcaccgcccacacctggcgctcggctggcggggcagtgcggcgtggggaccgtcccaccgccgccacctccgggaacctccacggggcgctgtcccaaccaggggagttttttttcttattttttggcacaataatctacagttgtcccctgtccaaccaagggagttttaagccacgaccgagctgccaggcggcagacctgagcccggggagcccgcgccgaccactcggggacaccggaagccagtgcagaaacgtttaatagaaataaaaaggtctgcatagagccgaggctcggagccacccctctgccgcacatccagtacagagaggattctataaagttcacactttttcattaagtagtagtagaaatacggtgaggccctgagactggcctggtgagcgaggaaaggccgctgggcgcttccactctgcaggccggggctgaaataacccgagttccgttctcacagaaaggtgcggctgccacctcttgacacagaggccggatgggcaggtgtcctcgatggccaggccgtatcagggtacaaccgcagcagtgcaaggggcttcctcaaggacaaatggctaaaaatgtcacggtgaaaatgtcatccccaaagagttcgttctccctagacccgtgggggcaacccagccttcaccgtgacactggccatctgcaaagtgccaactgttcttcatcgagcacgtgattacgtcactttcttcctttttgtgcgttttgtgcagcccctgccaaaccagccccctaggatgggggccgagctaagcggtgcaccccggtccccaggcggggcctcctctctgcttctgcacagcgacttccgactgtggctgccttcttcaccagcacgcaggggagtcgccagtgagaaaatgggatcctgccacctgccaaaaagggaaagcggcatcaggcgggcctgggagcctctcgcagtcacacctgccccagctcgggaaagctgtctgcggtccctgccttcccatccccttccctcccgtgtcaactgcggcggggctctggttggcggcagcttcattgttaccaagctgcagaacggatgtgggagaggtcacctcttaggtggtgactcaaaggtcggcacccacactagctcggtctcctcaaaactccgtgtccttgtccaccactgagcggcgtgcacacacagggtggggcagcagtggccccagggctgcctccgtctccagggatgagtcactagcaactctgggccccaccttccacttgtaccgctggggcaggtggaccagaccctctcccccttcccagctgactagggaggcgtggcctacagacgaccccgtgaagaaagcatgtgtctgacggagatgcagaaccacagatcataacttaagatacagatacgcactgataaggaaaatgagctaagttaatgtaaaaaaaaaatacagtacacgatagcccacatcacagaacaccacacacataacatacaagaagtgccaggcccagaaggtgaagggatccttaatttcttgaaccctttgattaaaagaagttattgatttcccctataagaccctgaaaattcacagagaaagagagtgtaaactttttactcaatacatacaccaagtctaaattatcacaaattctgtattaaggcacagtttgtttaagctttcccaaagtacgccaactcccaaaaccaagcacacagattctgtctgaccagagctgccgagtgctcgtcccctccagatgcttcccaccaggcatctcggagagctccacggggaggcctggagcaggagcacgcgggcagaatccctctccccgcggggattgtgtgtgccacatcagccagggcaggagtggcacacgcagggtctccgccaaccaccgaggtcaggccctctggagaccaccacgcttcagtcatgcctcaggcaccactgcaaacacctcagagcttcctccacactcagctcacgagagaagacagacaaggcccagcacacagaggtgcggggaagcaggctgctgcagcggctcactcacctgctataggcggggatctccaagcccagctcggccatgaggagccgcatgacgtcatcacacttcccatgtagcttcagggcagcccagtcatccttcggggtccactgaggacagggaaagccgagtgagagtaacagcagcccaacccttcccggtggcctgtcagccttggcccctacgggctcagtcggtgctccctgagcacccacgggggccctatcagaccgccctggtgcatgggtgtggggtgtctctggctgtgcgttctaagacccagatctaaggacgtggctctcagcacccgagttacctgcaggttcacgatgtaaagcttcggccgccggctagggggcttggtcatgcaccagaggcgtgggtacttctttagaacctgtggaagcagacagacagacaccgcacacacacaagggacaagtctgtacagtgctgggccgcagagctggacaccctcgggcgggcaggggctcggttcactcattgtgtcatcggcacgtaccttcaggctggaccctagacacaggatggtgtctgctctgctggcagcctcggtcgccgcttcccagttcaaaggctgccccaacgtccccctctccccaaagtgcacaatggtgtcccgcagctgggtcccacacttgtggcaggtccggcctgtctggtgtctgtggagggcagtgcgctccgtcacatcgaacacccgcacgtactccctgttgggaacgcaggaggtacagacctagaggcaagagggcacagtgagtgggacccgcctgcccatggagaccctgggtccctgcaggactgctcacttcaatgtacatgttcccgtggagctcggagatggccgtgcgcggcagcccactcctcaggtggagcccgtcacagttctgagacaccacatgctgcacctggaaggcagaacgggtggcaaggggagggatggctgccagtggtggtggggaggtcagtacccggccacagcgaggctgttctgagccccgccgatggctcccaaaaccaggggcagctccgtccccccagagagccttagaaagtaaaacacacaacaggtccaaccaccaggagtcaagagggcctgtggtggggaggggctgtccttcctccagccctgatgcacctggagtggctgggagggcaagaggttgcaccgtcccggcaaggttgggaagtggctcggggtttggcaagggccactctgccccagatccatgctctcttgggtcatgacatttcaggtccctggggacctaggcagatcaaccactacaccccattggttgagggtgttcagcagaaggtccccagagatgtcctataagcctcccctgtgactaggatggcttctgaggtccacagaaaaatgcaagggaatcacaaaggggaaaggccaccagcagctctgaggctgaggctggctgcggatgggatggttcagagggggagctccccttctgtcctggagagtcaagcacaggaggatcaaacccgcggcctaacccgcttggtgggtgctcatcatgggagtcaactggcagacagagggcgggtgcagttagttgcccactgggcaccaaggtgctctgcctggtccctggcaagtgtaccagccacccagggctcttaccagcttctgctcatgcagacgggtgatgctcatgtgggtgagggttggctcggcctcgctcaggtcggcagcactgccaggcagaaaggaaggcaaggtgaggagagctggagctcaggcccgtgctgccgctgcccagcctatgtgggaggccatgcctggcccgcttacctaacgcttctccctttctgaagcagtgtccacactccattagggccccggtagtctgggatagacgctgcctgcatgtcgagaaaaaaggtaagccaagtcaaaaggcaccactgtaggtactggcagaattcccagaaacggaaagccactgtcactcctgccgcattccgggctggcctgcatgttggcctctattcattccacaggctgacctgcctgagcccatatggagtgtaccccaattcggctcctcccttctacctggacttccgtttcccgcctggcctggctcatccttccaggctgcacgcagccctgcctgcctccggaagcctctctggcaccgagcacaaagctgggctctgtggcacatgtgtcctccacactgcaggggaagactagtcatgttcctaaagtgcccccagggccgagcccacagctcacacatttagcaaatggtgaatccctaggtgggtccaggcgactgtccattctcatgtcccagtgctgactattcccgctccaccttaacaaaggcagaacaacttcttcagatgagatgagcatctaacttcccaggttttcaatcctgtgaaacaaactgaggcccacagagggcacacaagatatgccaggatcaaggtgtcttgtgttcccttttggggactcccgactcctgcttaaactcagaaaaatgcaccacccccccggacagtagttccgacagtcacattcaagacgggaacctcaaacactccgatgaaatccactagctgcatgtgcttttagttgccattggaagttccataacaggtcacgtgactgttacataattacatgactggacttttttttttttttttttttttgagagacggagtttagctctttcgcccaggctggaatgcagtggcatgatctcggctcactgcaacctccgccttccagtttcaagtgattctcctgcctcagcctctcgagtagctgggattgcaggtgcccgccaccatgcccgactaatttttgtatttttagtagagacagggtttcaccgtgttggccaggttgttcttgaactactgacctcatgatccgcccacctcggcctcccaaagtgctaggattataggcatgagccaccgcgcccagcatgactggacttttacatgtgacttgtggagggaggagactaaaccccagggctccgggtatttgagtcagtagtgaactccctttttgcattcttgctgctgagcctctgctgttctttgcttggagtgcctcattccaaccttctgtaaatctcacccatccttcaaggcccaatcaaggccacctcccacaaaaagccaacgcaggtgggtttcccaactccaagagcgcagagtgtgtgtctgagtttgctctagcgacccagcacagccagctttacagtatggttatttgttcacatgcctgatccttgtcacctaaaagcttcctgagaacagaaatcacctgggttcagatctgctaggccgacgcgtgcccaacaccccacacacacccatcaaattagatggacgaggtgccagctacactttcaaagctagtgatgtcccacagcccaggataacttgtcagtgaaacttctcaaaacacaatgcaattctctccttcacctggtgtattctggctcttactgtgtcactttctacttatcttccctcgacatggacagaacagagtggaaaatcacaactttgggcttagctctgtccacataacctgggggtgcctgcgagcagtcggctactacaccccattcgtatctctactccttgttttttttaactggctgtaacacagaggccaagcgtttaaaaagcgtttaccttaggtaagttttggtcatttcgtttctttaagagaaaaaaccttagagctgctttaaaggcgagtttttcgcgattactggagctcatactccgtcctggggtacgcctccgcctccctccctaccgtgctgattcccgcgcctgtgtagacgaccaagtatttggcgttccggacggcgctggccagctcccggaccttcccccgcagctcctccgggtcgtcgcacacctgccaagacgccagggtggtcaccgccccgggccgccccacccgggaccgcccgtcgccccagctgctcccgaaaccgggggcgcccgcgcgccgcacgcggaactcgcctcctcctgccgccgcttcaggccctcgcgccgccggctccggccctgcagctccgttaccaggtccgcgctctcggccagcagccggccctcctcggcgctgcgctccgccgccgccttcctcaggatgcgcgacacctgcgggcaggcggacggtgagcggcggcgcgggccgggcatggccgggccggggagcggcggcggcgtacctggcggaggcgctccctctgctgctcctcccgcaacctccggacccgctccgccgctttgcgctcggagcggctcagacccccggctgccatcgctcccctggagacctgctcttccgcttccgcctcacacggcaggccgcgctcagggcgcatgcgcaagatgggccccgcccccacccaccccttccggctccgcccgccgcgtcgccccaaagaagcacctgccagtctctttaaaaggtttattgatcatatacaaaataaagaaaaccttatatatcacaaacatacactatgtacagcaataaatacccggggggccaggcccagtgctgcccctcctggacaataatttagcaataaatactgcgcagggcaggggtagggcaccaaggccactgccctgcaagaggtcaggcccctgcccgccctacacgaagtgtgagcgctcgggcctcaccccgcatccaaaccccagcccctcctcacttagatctttaataacctccatcccaccccagcagatcccggggtcttctcccacacacacaacctcccctggctagacctaggcagggcaggcagggactgatcaactctgcttggacccacctctcagcgccaggagagcaacagggctggacacgcgggcagcccttgtcctgttgccaggagaaggctttctgtgcccactcccgtttggttaaaggcttcagggactagcagattgagggggtgggaagaagggcagggctgggacacaaggttgctggaggggccaaagcccaactggggtcaccaagaacagggaggtctcacagtttatcggggacacactctagctcagactcaagggacacccatggtatcaaagctgctgctccaggggcagggtggaaatgtgtgggactggcccagcaggtatggtacacacccaggacacaggccagaggcaggacaggcattagtctctcagacacgccctgcctctgtgtggcactgattatgtactctactctcccgacctgctccaaggccagacagccaacaggaaggcaaaaatacaccaaaaagaattattcagtggcttctgggggaaaaatcgttaatgtgttggttcctttcaccaaaccacagcctaaaaaagtaactcacaagatcccagagcggaaacggtgcagcaggctgcggctccgactttccagatgtggatgggcgctttggccaagtggccactccagagggaggcagcagggacaacatgggacctgaccatcgtcccaaagcaggctgcagccgctcagggccgtgggccgggccctgatcaccagtcagaagtgtacacacatatctgaaacatgcaccaagagctgagccagcaacaccagtgccaccccgagcagcagccaggggcctcactctcctggtgagagctgacctgtccctgctgggtattcctctgaaatctgagcgtccatgttaggataaaagaggagttggggcaaagttaaggtggaagggaagacatatatcatggtttacttggcggacaagtttgagagacctggccttggccaaagccctcgattcgctgtgtcagaaaaactgaggtgagaagagaccaccaccctctccaccaccctctcagtaggaaagcgggatcaacagagatcagaaggacagcacactcacacctgcacatgaacacaccatctatgtcaggaaatccaggggaaggggaagaggggtggagtggctccgcagggctgacctgacaggggacaggaacactcccctagacccagggaagtcgccccaaatccaaagctcttgaaaggaggtatggcctcgaaactccagaagcctcttctgccaacgcaccgaggacctgcacctcccattcagcacgcgtcgacccttacaccctcctcttccacactcccttcgcctccaggtctgcagcctggcagaggtgctcaaaatggatggccacccacagccaggacaaaagtgggggctgcacaaggacaaggagggcctgtttctccccactccgaggcagatcatgacgttttcttcatggatacttatgatatgattccaactaacgcctggattctacttagacaagatcagactgaggggagggggatgaagtcactaaatgacaagagtcaacagccaatatttccattttcaggctgacgcaggtagacacaggacttgtctctgaacacctcgagcaaagaaaagctcattaacatgacaagtgttgatggtgcctccctgttcccatcctgtgggcacaccaggccaaactattggataaaaatcccaccatccatagggttaagccctgttgggccacagtttttcatcttacccacatctgtgtgctttacagaagtctgggccccacagaaaagaaaccagcaacccggtgaaaggccagggctcacatggccagacacagggctgtagcctcttggaggtgggtaggggcaccccctccccatcatatgcctacaaggagcctcctgagcccagccaggaagggcagcagcctctggcgaggaactgagagcaggaggcaggctgcgcccccacagggaggcacctccagcagaagccaagcagctgatccctggaagacacagatcccaaagggaggcagaaggcaggcccgaagccaagagctgccagcgtggaccagcggagaagagggacaagacccggccctggagactgtagcccttgtctgcactggtggagacccccaaggctctcagagtgaggcagggacaaggaagaaagggcggtgcccggtgggcccccacccactctgcctggaagcaccacccgcagcatggaaacacctcagggatcaagcgggcggcgagacctgcagcccacggcgcgggcagcctataggaacaaagctgaggccagaggaagacggccagggaacgcttggccatagccctgtggccacccacagtgactccctcatccctgtaatgccaccacccaaggccagaggtggtgggtgtggaagcagcgtggggcgccccaagggaccccagtttcacctaccccgccactagatcagcccaagccctagacacagatgtagccaaggctcagtggaggggggcatgacagaaccccatgtctcacctcctacggaccaggagctggtggtgggcacagattccttgagctctgacgcagcaggcgccacttggcaccccagcccaggtccagcaagccagcagaagcaaaagcacaactaaacccaaaaaacgaacacgggaaaacagacacaagaagtgacacccacaggtcaaaggtcaccagaagcaccagcactttaccgctgcacaaaacctcaccaggcacggacgacaccacggcaccggcaagagacggaagcaggaagggcagaggagtaagtcactttcggtacaattgcaaaagatatcaaagaggacggccttctggtcggctcacggcttggcttttttttttttgtcttttttttaaactaagttttataaataatgtctgataactctgtgtatataaaaactaaactccaacagccacaaagaggtgtccgtaagtttacaagaaagggattttttttctttttttttcttttttttttaactagcaaagtttctattatactttcttcccttttccattcatatggtcaaatggtcttcttgcttgttttttttctaaaagacagttttataaatactctgcagctcttttttctttaacttttaaacatataattaatttaataactttgtaaaaggaacttctctcttttaaataaagggctatataaccacacaaataggtcatgtaaacagtgacacgggacccatcgcagggcacactggacccaccctcacgttaagcgcacaaccagagatttggtcttgttcagtgcaacgggtcaggcctgagtgcacagcccctgggcccagctgcacgcccccagcaccactgcgcccaggctggtggtccacccatcagggccttcaagcccgccctactctcagagcagagcccatctcttcatgctgggctaagctgagctgctcccctggggctaaagagagtgaatccttcccagcccgcgagcctgtggccactcgggagtggagggaacactgggaccctcactgctcggggacacgcgaggcccagcgtgcctgctccttctctctcccgcaactctctctagtccgttcccacagcaccaactctggactccaagcctgcatggccctggtacaaaaggggttggggcgaccccacgtcaccgccgaactgaccaatcccaacatacaaaacacacgacgacaatgacgagatcaaaggggctcagcccggcgcccctggggtacaggttgtgctttgcagggaagagagaagggtggggaagagagggaggaaagagaagagaaggaaacagagggacagggcagccaaattcgccatgtgcctagtggccccgcaaagacccgcctgggcagacgcgcgtccctacgatcgggcatccgtcttggactttactattgtgatgacgctggtggcggccaccttgcctgggacgaggggccccaggccggcggcaagggggccccgggctggcgccacggggctgcgggccaccgtccgggcgaaggtctgcagcgcctcgtacttggagcgcagcgcgtcgagctccagcttcatgctggcgttctctgaggccagcttctccacctcctgctgcagctccgccttctgcttctccagctcctccttctgcgtcacccgcttcacgcggcagctggcagcgtagccgcggttcttgagcgtgcgccggcgctgcttcagctggacgatctcctccttggacaggccccgcaggtgctggttcagctcccgcaccgacatggtcaccagctcctcatccgtcaggctggtgccattctcacccggctcccgcttcacctggggcacagtgcaggtggtcacaggccaagcgggcacgcccactgtgccccccgaccccagcccacaggctcctgtccctgcccactcaccttcaaggccttgtttcctttattgggggtcgtcataacccgggggcacagcgagcaggcgctctctgcaagacacggagcaggtcagtaccctggagaccaccctcgccgcacccccccccccccgcccccggcccagttcacaagagcccttgccgcacagcccgccccagcctgctgtccaggtgcccagcccccaatacctgataggaggcagcccttggcctctcccaggctgggctgagctgcttcctgtccaccctgcccctagagaaccaggtgggaggtcaggaaggtctgacgggagaaggggaactgaaggctgttaggaaggcaggcgcaagacaaggggcaggggagagattagaaggaataagacgcgggagaggcaggcctagaaggaagccgggagctttaaaaataaccccggcactgcccagagcgcggctgttcctggcgagtcacgctgactcagcacattgcctctgcctccccgccgcgcccgcactccctggcccgccagccaacagcgccccacgagagccgcagcccccagcctggccaatagcaggtgagggccagccagtgaccctgtgtgtgcatcttccagggtcctaccttctacagccacctcccctgagccggcctcggacaaagccccctgctccctgggtgcacaggggccccacgggggacctggccagagaggaggctacagggaaccccgagtctcccagcctcctaactttgaaaagctgggggtgggccgtccatctagctctggtctgttggcaggactgaccagggagttcccccaccttccaggtggcaggccatcagctgggaggagcctggcccgaggcccctctagacctcccagtcggcctcctccactgatggagtaaccatcctgtggctttgggttgcaggaagcagcccctgccccaccccatccagggtatttcacaagggctcccacagtgagccaccccgggcctgcccaacgtgaaggctggcggagtcagcccctccgagctgcagcctgctctctggtccctgccccgggtgagtgcccacagggccagggagcaaaaacaaaagtgctggggtggccggacttaacaaccaactcttccccactcggggtccctccagcactctgctctcactttcttgctaaggatgtttctgggattcccagctcagcccagctcccaccagacccttgggcatggacccccgcctcatgctccatcccccactttccaggtttgatgcagacagatgggagactcctccagaggagctaggatcacttcaggaaattatgggctggggggcttcttactctcatcaggggagctgaagtgtggccaggcggatgcacacatcctcaccaggctcaagactccacctcacccagcctgggaccaggaggtgaggctgcaagcacagagcagggaggggaggccagagacccctccccacagccaagccagctcagaggcaaggtcccgaggctccagccactggattcttccagataaaggatggggaagacctgagctggaggtcagaaggcccacaggagccctttcctacacgtccggcacaacactgccccaggagacaggccctcagccaagcatggaggggccccccagccttgagtgcaagtcagggtgcagagacactgccctggcaccagcttctcccacccccatcgcccccacccctgctgctaagcacaatgacagtggtgacttcctgaagagatcacacggaaaagtgcctcctcgacagattttgccctccgcagaaggcctgaactcagcacaagtgcaagccatcgcctcctatcaaaggtgcgccggggggtgggggaggggcagccctgagcacagccagtgcgttccaggctcctggcctggcctctggacctgggctgagagggaccatgcagggatcccaggagctggactgaggagaagctgcccccgccctcctccagccctcaaggctgggcagagctggggcctgtcatgcaccctctgctcccagaggctaataagcccacctcacgcaggaggcacagatggtcacggctccgcaacctgcgagggtacctaggccacccattcacactgagagccaggaaagggagggagatttgggagctccgtctcctttggctaaagtagaaactcccgtgcctgaacacagacagccccacctggctgcaaagcccagcggccgaaactccccggcagtcatggcctctgctccataagctctcagctcctgaaagtcactctttgaacagaacctaaaacttagtttccactgatgcataagtgactgagaagatgtacataaatgggccgcgcggtggctcacacctgtaatcccaacactttgggaggccgaggtgggtggattacgaggtcaggagatcgagaccatcctggctaacacggtgaaaccccgtctctactaaaaatacaaaaaaatagccgggcgtcgtggtgggcgcctgtagtcccagctactcgggaggctgaggcaggagaacggcgtgaacctgggaggcagagcttgcagtgagctgagatcgcgccactgcactccagcctgggcaaaagagtgagactccgtctcaaaaaaaaaaaaaaaaaaagatgtacataaatgtccctccaggaccccaaaattttcccagggcatcaaactccaggccaacggtcagctaaaacattgaaacatctggaatctataagccccggggctcactgagagtggacctgtgttctgtgtgtatgtgtggggggtgctcactgagaatggacctgtgtgtgtgtgtgtgtgtgtgtgtgtgtgtggcggggggcggggggcatccctgagggcaaaccacaaagtagcctaacccagccatgaaatgaactcctgggcaaaggaagtcaaccttcgtgaatctccacatacccaaggaaaggtggctctggccacatcactcccaagctgccactttctaagcgtcctgggctgccaggccagacacccaacagggccactccctttgctaacttcacacaacgctgagaccccacttcaggtagcgacaactttagggtggctgggtgctgcgttctgccaccctgtgccatccacaccagcccatctgctgcaccccaaggctaggcaccctgaagctcccaccacctacagtctcaacccagactccagggccaactggggagagaggctgggctgcttcctcccctttgccgtttcctggtagagctgcccctgcttcctccctgcccagcccactgtcacccagggcttggtacacacacccctctttctcccaggacctcgatctctggccaggggctgtccaaccaggccagtcccagggaaagccgacttcccctttggctagctcggcccaccgaagctcctcccctccctcactcagggaactatttcccagtttggaaaactgctccagacttgggaccaggaccagctgccggaaaagagccgcctgggaaggggtggaccgcccggggcttcacctttgaccccgggagaacacctgcagcgagccacccccacttcctcttcaagcacccctgccttcaactggatcgctcggcgctcacttaaacaggcaccccaaggcgccgggcctggccccctcccacatccccacggctccctcccacctcccgctggcggccttttagtccccgaggcccctcgctcgaatcccctccggtatcagcttgagcaccgagtgacctcacgctgatgactcagcaagtctccctccgggctctggcacgcgactgacggaacccgagccccagccaggggcagggtcttccccgcagcacccccatcgccgcccctcctcccgggctcgccgcggacccccgcgccggggagagctgacgcggccaccggatgaatcagcagctgcgggccgggccgccgggccctggcgcggacccccgggcgcctcgctcgaccccaccctttcctcccgccgtccagtgcccctccctccaggacgcccgggtctccgagtccgctccgcactcgcccggctccgcgggtccgccgccgcccgcggcccacctccagtacccgggcgccaggggcaggaggagctggctcctgaccgctggggaaatcgaggcacgggccgccagcagggtgcgcggcagacccgaaaccagcggcccccgccgccgggcccccaaccgcccgcctagctccgggaggagccctgcctgcgcgccccctcggcccccgccgcccccgccgcgccgcccccaccgcccgggcccgccgccgcagccgcactcaccacactgcgggcccggcgggccgaggccggggcggggcggggccgcgcgcgctccgaggccgcgcggggcagggaccggcgcgaggggtccgggcccggggctcggaggactcgccgcctgcgcgggccgggccgagcgcactgggaaggccgggccggaccaggctcgggatccgccgccgccgccgccgctccacagacgtcacatgatgtttggtcacgtgggctccattcatgaagcggcgacgcggccggccggcgcttaaaggggaaggcgcggcggcgggagggcaaactgcgcatgcgcaacccgcgcgccgtcgtccctggcaacactggctgctctagcgcctggcggggtctcacgggcgggcctgggcgcacggccaaagcgccaggtctccacccccagcccccggcgtcctgcagccggagcctgcctcgcctggctcctgcgcccgccgtccagggcccctgtccaagctcgcggacgccggcggcgttttccagctcgagtgctcagcctagggcaggctctgcgtgcgccccctcgagtgccggcctgggccctgccaggcagaggcgctcttgcgtcaggacggcgccgccggggccccgcgattccaactcgggggtcccggagcggcgcggggcggggacggcctggcagctcccagcagcgaggggcgatccccgcccgcgcagcagaccccgagctgcccaggcccttcctgcgccacgtgtacccagagctccgcccgggggagacttcgctgcttgttggagatgcccagcggtagggggcgaggactcgggaggaagataaacgggggatcccgtgtctggactttctcctccaccctcttcccttcgcagctgtgaatcctgggaggggaagggtggccgccccgccagcaggtgagcggggaggaaggggcggggacgggctgtggggtcctcctgggctccgtccatgaacaggccggccccaaagtcccgaagccgtgaggtgtaaggctcagaagcgtccctccgcctgtccctgccagaccccaggaactcctccgagccccacagcacgttgtcgccgtgtgcgctgtggggctgcgtgtggttcttacggtggtgtccttagtcgtcggggacctgctccccctgctctggacacagcccgagtctcacaggctctaggggcatgatatggtcctggcgtggcttccgaggcctcaaccttagtgtacaaaacagcacacggggccctgaggccaggagtgcagctccgtctcctgcctctcctccctgctcgcgtcctcatcctaccacaccacactgggctggcgaggggagggcgccctgagccgctgggcatcctgctccgcgggagggtgaagtcgtgcattgctgggcggtgagggctaggtccacacagcggggacctggcgggcccccgagtctcctcaggacccgccctccgtgccacacagcgggagctggagccacggtgccgtcaggagccaggggtgattggccctggggctggcagcccccaccccgcgggcagacgctcaccaggctgtccccactcactcccacaccccaactcctcctcacagggtcgagcccgctctcatttgcacctccgcgcgaatttggaacggatttatgaatcgtcctcactgcggtgctgtcttctcctgggaaggagcctcagtcctcccctccctgggcactgtcatagagatgggcaggacgggctggggaggacactcagggagctgcccaggctcctttgctgcccctcaccccagaatcttcttggggtgggtggggtcccaggcacctgcagagtagcatacggtggcttgtagaaagagtatcgagggaggggaggtgccacgtggaaacagcccaagccaaacccctaggacctgtctccctgtcctcctagagagctgaaggtgttccgtggtcagtgagggctggcactggctctgcacgaagatctcctcacctccccagcggctcctggccagctccccacggagagcccaggacacttgtccctggacacagtggtgcagccatgcttgggccaaaccatgaggccaccagaaccgcgaaaggctactgtactgagagggatactgcgagagaggcccacaggtttccaagcatccctctcactccgcacactcatctccacgaccggctttaagtgcggccttgaggcctggctccctgtttggacttctctgcacctccaggagctcacttcccgtcacagctggatgcctcctcccgcaggcacctcccgggcatcctcccgccccaggctgcaccttctgtgggactggcccccgcaggcacctcccgggcaccctcccgccccaggctgcagcttctgtgggactgagccccgcaggcacctccccggcatcctcccgccccaggctgcaccttctgtgggactgagccccgcaggcacttccccggcatcctcccgccccaggctgcagcttctgtgggactgaccttaagaccccatcggttcctcctgagagcagcagatctcagccagatgctgccgggagggaggtgctagcgtccacacccagacgggtccagtccagccctgctctccctggtctccaggcagggccctcccagggtggacattgcccatctctgcctggccaggggctgctgacccactggttccagagtctgagcctgtcctgcacaagtaccatggacaggggtcagccgggcactgaagaggcgtggcagaattgggcagggcaagggccccagctggcaagctggagtcagggcaattccaaccaagaaactgcggcaggccgggtgcagtgtctcaagcctataatcccagcactttgggaggcagtgggagaatcgcttgagcccgggagtttgagaccagcattggtaacatagagaccctatcgctacaagaaaaaaaaaaaaaaaaagctgggcatggtggtgcacacctgttgtcccagctattcaggaggctgacgtgggaggattgcttgtgcccaggggttgcaggctgcagtgagctgtgatcataccactgcactccagcctgggcgacagagaacctctctaaaaaaaaaggaaaatgaaaaataaatgggggcagaagctgagccaagcagaggcgggcagctcctcctccagggcccacctggcctgctggggactcactccaaaccgcttcatttttggagggggctttccaggactgagaggtgtcagagctgctggtgacaggagcagggaaagcaccatctggccagcccccaggggccccctgtagggttcctctgcctggcagcgtttcgacgcttcttggcaggatccttgggtccttggcccccggcaccatctccctccttgacctgctgaggcccacataaaacatgttgctacttggggtgggcccgtcctcacgctctgtggcttcctgggtgtccacctccccacagcctgcctcacctacctccccagacttctcacgcacgtcaggagcctcctgtggactctggctctacctgcctctggcctctgcttaatcaggaacccacagtgggaaagctcctagggcccgcctgctgaagcaaacgcctccttgcaaagcccgtctgcagccccccacacacctcctcacctccctgtgcttcctctggagcccaagaccagtctgcctcacttgaaacccgcgtcgcctgctggcttcccttgtgtccccggaccagaagcacctttggcagccccgcgcccctcgtcttgctctgcgtcagcacctgagaatgggcgctagcagggaaactggctttgaggggaatggtcggggcagctttggtcctgggacaggcgtgtggcctgtgggacaatctcttctgggggcacctctgcccaggtgggaggagttgccagggtctcccagcactgccaggcgctttgctggggcagggggttattctattgctcacagccctgacacaagggcattccccacccgccctgatgcccacatccacccatacaggagggggccttcaggggagcctgcagggactcccggcccagcaccgtccatctgtgtcccccgcttagctcctgcactgccagatctcagccagacagcagggactcaccccacctaccgtcccctttgtgcctgggtgtggtgggtactcgttttatggggagtggccaggactcttgccagggggagagtggcggtggaggatgtacccatgccatctgccctgccgcagcgtttcctccctgttcccctgcatgtcttccctccctcgggggaaacgcaggattctgttccccaagcgccctctacacgccccatatataccaagcatggttctgcagtgagcctatggggtctctggaaatgagttcccgggataagttccagaaagttgctcagctctcctaacccctgcacaccctggagccccctgcataccctgactcctggcgcacctgggacccccctgcacaccctgacaccctgctgctacccagcccagctcccctcacacagtgtgcactgcctctggagggaagggggcctcatcttgctgtctccatactcagtaactatgtgttggttgaaggaaccagagcacccctggcccttgtaacccaaccctcagcagctcctccaatcctgtgggcctcctggaatgggtgattgtatgtgtccacttgactgggctacagggtgcctgagtgtttggtcaaacattattctgtttctggcaggggtggggaggggttgcatgagactaacatttgaatctgtagacttttgcattagattacattgacattttaatcagtaaggcagatgccctccaagatgtgggcgggccttgtctaatcagttgaaggcctccactattccacccacagtaaccaccctcccacacaggcagggcctccctcctcatgtggcagacagaagtcaggacactgggggctggaaaccaacttataaaactgaaagggccaggacagaactgatagcaccctcccagggaggtcaggagcaggaggtggtggccacagaagttcaccagcagcccaaggagccctttccccaaatgtccatgggatctgcgtgcttggcagccaagaggggctgtggcccttcacgctggacttgggatgcctggaccctctggcccttctcacacgggaaggagaggtttctccctgaatggagggcagggaggggccgggagggggcgtgggatcccacctctgctgagccttcacagagggggtccttgacctttgctctcaggaaggagcccgtgccagctgatactggagtaggagtgggtgaagaccctccgggctcccgagctctagaggaaggtggtcctgacatggtttgggagcagagaagaaaggaggttgaggttggggaatccacccctgttctgggctgggaagcacttgcagaccacagagatttccagtgggaagtgatgtggcccctccctggctatgtccctggctggcccctgcgctgatcagagccacagaaagtgggccactttggggaccccctagtccccctagtgacaagagaagagaaggtggtggcaggatggtggtcaggcaggacgtgtcaatccttgcccgctggggccaggctgcgggggagcagcttggtgtggccagaaggtgacagagcggtccctgcaggggagtccagcttcaccttgtccaggatggtcttcttgatggcggctggtgacacctgctcctggtcagccatggactgcagctccctagagaggcagggagaggttggctttggagcacaagcgtgcacccaggaagagggagtgaagcccacagctcccagtgccagtcagccctgggcgatgctgtcaccctcacctcagcacctttattcccctctgccagcgacacgcccccacacagctgctgggctccttctcacctcattcgaatcagctcagcatcaccaaatctccccgcagtgccccccagacctgagttctcgtggccccaccacgggatgtgggtttacacctgtctcccctgcaggctggaggtgaggccaggcccctcgtgttcccctcactgttacagggtggcactcgcagagtctgagggtgtctggactggagagtgggcagtgtggcgagaaagacgtcctcacccaccctgcagacctgaactggggacagcggctcccagcctggctctgcctttgaccagctgtgggatcccaggcaaacagcaaactctgtctttctcttgctctttgcttctttcaccttccatggaattttccttgtgcctggatgttgctgcgtgtcctactggtctaacttaatcccacagcgagggcaggaggaaggtgggcccccacagaagtttcctaatgtggctggccaccccgccaccccactggtgtggcccctggctcaaatgacactcctagctatgacaatggtgaacctatgtggggagcacagggcacagcatccgggtccctctatggatgttccctcctcgcaggaaacggaaggtggggaggggcactgcccacagtaacccagggaacctcggggccccctgtgtcctgcgcaacactgggctggagctcaatacgtatctgctgagtgcgtgaatgagcagatgtgtgtgagagaggcctctgccatgcaaggactggagaccagggaagcgggcagcgcgggggcccaccgtgtgcggatgcaggaggcctccacagcgttgatgagcagggagcggaagcccccactctccagcacatgcaaggcatggatggtggccccaccaggagagctgacgttgtccttgagctggcctgggtgctgttctgagtgcagcagcatcttggcagccccctgcagccagaagaaaggctgacggctgtgggcacgcacctgcctctgcggggcactgccccagccactgtagcacacactgacgccccacttggctcctcccagtgaagccccagggccccgcaaagagtggccccaccagagggtcaggaaacacactgaccaggagggcctgggccccgaggcggactgccaggcgccttggaagtcccatcttcacacccccatcagccagggcatccagggctgtgaatgcctgtggggagaaggcaccctgagcctctctcctgggcttctcctccttcccttctgggcaagctccagttcccacagccttggagccctccaccctggccctcccagggggagcagggacagatgtgcccggtggtcccgggaagtgcccgccgccgccagcttcccccgcagtccttacgtaggcggggccgctgccactgagccccgtgacggcatcaatcaggtcctcttccacctccgtgcagaagcccacgctgctcagcagctgctccatgagcctcccgtcctccacctgggcgtgcgtgcctgtggcatacacggtggccccctcccgcaccacgactggagtgttggtcatgcagcggatgaccctgggggctggccgaaacgctgacagcttctggaagagaaaccagcgtgtccgtctggccatggacgcagtgcctagatgcactcaccccaccaagcagtgcccgagctctcccagtgggccgggacgctgcaacccttttgcagatgaaaactgaagtactgagggcccgggctctagacagcccctctccacaccccactgggcctgcggtgctaccttctcaatggagctgatggtgacgccggccgcgcaggacaccacaatgtgtctgtcctcaatgtcggcgcctatttcatccaggatgaaggggatgatgtgtggcttcacagccaggaagagcacatcactgtgctgcaccgtctccttgttgtggggtgtcaacttcacccccatcttctgcaggggcaacaggtgggctcagcctggtcccgtggctgtctgtacccccaccaagccaagagccccacaggtagaatggcacagagaatgctggagttgggggtgggcagggctgggggctcagggctctgaccacccccttgatgacccttcccacccagaaatggaggaagaactctgtgtggaatatgtccctgctgcagacagaaaaggaccctccatccatgccaccaatctgcccccagcctgggactgccgtcctccagaccgggctctccacgtgggagtggtggtctcaagcagcccccaggtgtgttccttggctgccaggctgtggccccacctgccaggcccccagaggacccctcgaaactttaaccctgtgcagggaactccattccagaacaacaccctcctatcagctgtacacacgcccaccacccaggtcccaagagcaatcagcagggcgaggaggtggggtccatgagaccccagcccagggcccctgccctcactggggtgggggctacagcacacactcctgcctctcacacccagccccacagggactcagtctcctttctccctttcatctgcacctaccctgagagcagaaactgtggccaggtccatgtctggggagctagccattatcttgtgggcagccaagacgcctgaggggagaaacagttcctcttcagttctttattatttttttttttttgagacggagtctcgctgtgttgcccaggctggagtgcagtggcgcaatctcggctcactgcaagctccacctcccgggttcacgccatgctcctgcctcagcctcccgagtagctgggactacaggcgcccgccaccacacccggctaatttttggtatttttagtagagacggggtttcactgtgttagccaggatggtctcgatctcctgacctcgtgatccgcccgcctcggcctcccaaagtgctgggattacaggcgtgagccaccgcgcccggccggaaacagttcctcttcatggctagctttggcttccctccctccccattcccaggaagaagagtgagacagcacaggtaaagccccaaacacacagaagttgccagttcccgcaggactcaggccttgtgacccagcacccaccttcagcccccagccctgcagaagtggaaagaggccagtctctcccactgggcctcaccgtcccccacctgggggcctacctgctgctgtgaagcccttggccagggcaaaagccagctggccagcgccgatgaagcccacgctcatgctgtccggagacccctggcccaaagcccccacagatggcaccggctctgcgggacgagaccggcaggatcgagagcaagttaggggggcagtgccagcctggccgctcctcccgcagccgggtgcccacctcccctggtcccagctggtctaactttccactttgctgtccggcccgttaactgcttcggggcccccagtcagagcggcggtgcctggcctgctgcctagggtcccgcacccactggaggggtggaggttccgcagaagaaatgactgggaagggggaaaagtacggggagagggagggcccggcgcctaggggtcccccgtctgggttcccaccccgcccagaactgggctaccgtcgcgccccacccggcgaccgccgcccaccattcccggagcccgaccccaacccagctaccgtgcgcgggtcgtacccacccctcagcgctgcggccgccacgcggcacccgcacccaggccccgcccccgtcgcgccagcgaatccgggcgcggccgccaggcgctggccaatcagagcgcgcggcggcgccagagcggttgcatcatctgcgcgcccctcccacgccgaccgccggccctcgcctctctcgcgccccgggatcccccggcccccggatagacaccctctccggcacgcggtcccctgacccgcgctcctcctggtcgcgcttcccgggacctacacgtggggtccgaggacgcgggcggagggggcggcccgattggggcctgtgaggggccctccacgcagggctttgtcttgggccacccggacacggacgcgtccagctggcgtccctgggcgcgcggccggctctctctgggaatcagtcccttctactgtcatcgagtttggagaagcccggctgtacagcgttttctttcctttttttttttcccttgggggcagagttgaaaataatttgccaagtggaagcattttaaatatatcaccatttgggccgggcgcggtggctcacgcctgtaatcccagcactttgggaggccgaggcgggcggatcacctgaggtcaggagttcgagaccagcctgaccaacatggtgaaacccccgtctctactaaaaatacaaaaaattaaccgggcgtggtgacaggtgcctgtaattccagctactcgagaagctgaggcaggagaatcgcttgaaccctggaggtggaggttgcagtgagccgggattgcgccactgcactccagcctgggcaacaagagcgagactccatctgaaaaaaagagagagagaaagaaaggaagaaaagaagaaaagaaaagaaagaggcatgacagtgcggccacaggtgttcctctaactgggcacgcagcggtgctccactaagcaaacgaaggaagcccaccccatcatgcccccactcccacgcagcccggagcatcctccaatacccaaacctctcgcctgcctgggttttagggggagtgaagctccagtcacttccccctgaggacatgctcagagttcatctgattcgggcctgcatctggggctctggatagtcagggtccctgtcggtggccaagattaagggcgaagtcagaagggatcactggcagcccattcccctgccaaggggtgagaggagctgccttattttttctgtgctgtatcttagatgatgacaggctattctagcacatcatttcagaaggcctgggatgcttctgccacagcggcagggccacgcgttctggctatctgtctacctggtccccccaccgtgaacacgtaatgaccaccaccaacactgggaggctgctctgtggtggccatgggaagagcttgtccagatggacagctcaaacctggggcacggaggctagcatcgcctaggcgctttgagagccaagctccccaggctgttacaaaatcacttttccccaagtgataacagcaagtaacacttttacctaaaaacccaaaaacccaaaatggacagccctctgggccagggatacactgtcaaaaggactgactctgaaggaagtctcccagccctgggtcccctccccttcctttctgtccctcaggacctttgcgaaggtggcagaggaccaccggacagggaggaaattgggaagttggtgacaattaactcgtttcagaattctggccacatgaaaaaaaggagagaaggaggctgggtcctctccaagactggtgcccaggtctcccctgagtcaggaagcaggtgatccctatgccccctctgtatcgccctcagccagcggcaggccctgaacagctgactgccctcatctgggatctgccattgaccccaaaacacccaccccctctgagtaaaggatgtcggccggaccctgtttgttggctaacgtgagcgagacccctcctcagcggccagtgaggccccttcctcacattcttcatggcagcagcacaggcctggctgtggggaccgccgtctaaaaggagcaacagtgcgtctgtccatcgctgtgtccagggcctctcgagacccccagatgggcgtgggggaggaggtgagtgctgcgggcctctgggagggacgggcatgagccacaggcccgtcggagccaggctggcctgtcacccctgtgaggcagaagacgctgcctgccccttccccaggaggctgctcagaccctcaggagcccagcctgccctgactgtgatcccaggccacttccttcctcagccttcccccagagcacgctaggaggggccgccaggaggggcaagtgcccacagtcccctcagaagagactgctggtccagaggcagggtacgtataaatgtcagcatttatttcctgctcaaggacgtcaatggggcccagtcaatgggctgaggggctgttgtgccactgcccacccggcttggactcaggggtggccagtgggtcagctcctggctggaccaggctgggcttctgtgcaggagaagctggctggagcctggaggatgatggccccggcgtcaggagtttcggcaactggacccttgagcagaggcaagcagtacccagattctgtgtccagcggccgccctcagccgggctccctcccagtgccacagatgcccacagtgcacagatgcccgccgggcactgctgaagctgcttcgtcacagccaatggtgagtgtccaggtggggctccgtggctatggcggaaccaggtcctccccgtccactgtgcactcggtgccgccgggctctgcaggctcttccaggccacccgcgccacctccagcctgcggagactccggaggaagcctgcttccaaacactgtggctaccagcccagaggcttcccggacgtgggtgggagaggctggtccagatttctggctccttctctgtgagctggcacagctccccaggcagggctctcttcccagggttctgggagctgcctctctgaaccaggagtggttccggctccccacgcccctccctccccttgcctggcccagctactctcctgggttcgtctcctctggaagtcattcctctttcagcttgccttacccagcctgactgtggtctccagacactaatggaggtactgggtgcctcgcaaatgcttctagcctccatgtccccagctgcaaaatgggtcacaacagcagctgctttaaagttttcccttatgatgttccagtgaccagcactgagccccaggagcgctgggaaatggtgagagagagtgagttggggattggcctaggtgaggctctcccctgcgtctgctcagggcctctgccctactgtcctgcccttgtccctctgagcccagtctggaagtcggggagtgacctctcccgttgtacttcatctcccctgagcccgcggcttccctcctgctcgctacttgacactttggttcacctgagtttccctcgcagagcctggagctggtggccagagagcagaggtgggtgggctgccactgtgggctacaggctgggcacgaagcgaatcctctgggagtaggcgaggtcaacgacgtacaggagcaggttgacgtaggtgaagatggccaccaccagctggctgtcccagggacagctgccccgagcacagttggggggccgtttgggctcaccgtacttgggatcgaaacagaagactggccagatcacggcggcgctgaggtacaggagcacagccaggaaggtgtacaccaccaccagccggtcaaaggggcagcccaggccccctgtgtggcccatcacactcagggccaccacggccactgtggccaggaagcacaggctgtagacggccacgcaccactgggtggccacgtagcgcccgtagcggctgtcatggaccagcgccccgaagatgatgcaggccacgaaggcctggacgatcttgaggagccccgacaccgtggccatatagctgctcacctggccgggccgggcccgcgtcagggccacctccacagcgtaggccaggaagaggagcccggcgaagacactggctgccaggcggaagtccctggcagcacagccggcgggctcgggggaacactcccgccgggcaaagtacagcggatacaggaccgcagccgtcgcgcatagcagggtggccagcatggcgaaggcggcggtgaagttgccccaggagagccgcaggcagccgtggagccgtgtgaactcacaggccaccaccagcgcagagacggcgaagcagaagccccaggcggccatgcagaaggtgccctggacgcccgcaaagccaccccggtgggccaccaggctgaaggtagtgcagccaaaggccagctgcagcacgcgggctgtgcccacaggggatgtcacggcgcccaggtgcaggtacgcacccccagggggctccatggtgctgcccatctggccagccacgtttccagctcacacagtcccccaaggccctggggtccctgctgggccaaggcccctcagtcctctgcggtagtggcaggtgcctgcagcctgcagaggcagtgacgacggtgacattgcagcagggcagcctctctgctgtctatgtgaggcggctccccccagcgctataaatagacagccgtgatcagagccccggaatagcagcttgcgtgcctgtccccatcttagagagacatctgacccctggtcccctgtggagcccctgccgggaccattaacccattggctgctggcaccacccccacctccgcctcccgcgcacctgcatctgtcaatccggtcagttggtttcacgcttgtgggggagggggagggagaaggaggggagcaaagagcatgagggtccccacggggtaaccccagctccagcagcctccagggccagctgtgcgggggaggggtgtaggaggcaggaggcggcagcctgggctcctggggctcgcgggggtcggggatggtttccccaacatttatctcaccccttctggatggccgcgtggttcagagcctgcatgggcttcaggatcctgctgtcattgcctggggttcacagggttctgctgcggccagaggagcagagcatggagaccgtggcctctgctccccgagccccgctccccaccctcattctgtctcgtccctaacctgcctggggcagagacatttgactgttagttactgttactgtttgcaggggccattctggggcttttcacttgtccttcacattaaacacctagaaaaacactcaactcttccctttttttttgagatggagcctcgctctgtcacccaggctggagtgcaatggcgcgatctcggctcccaggttcaagcaattatcctgcctcagcctcccaagtagctgagattacaggcgtgagccaccatgcctggctaatttttttgtatttttaatagagaccgggtttcaccatgttggccaggctggtcttgatctcttgacctcatgatccgcctgcctcggcctcccaaagtgctgggattataggcgtgagccactaggtccggcccctcttttttttcgagatagggtctagctttgtcgctcaggttggaatgcagtggtgagatcacagctcactgcagcctcgacctcccaggctcaagtgatcctcctgcctcagcctttttatttatttacttatttatttatttaaccacttgcactcacttccacctcttccatttttaagctaaaatatgaaatgtttttaaaaaggaaaaaaatgatatctttttttttttttgagacggagtcttgctgtgttgctcaggctggagtacagtggcgtgatctctgctcactgcaagctccgcctcccaggttcacgccattctcctgcctcaacctcccgagtacctgggactacaggcacctgccaccacgcccggctaatttttaggatttttagtagaaacggagttttaccatgttagccaggatggtctcgatatcctgacctcgtgatccacctgcctcggcctcccaaagtgctgggattacaggcatgagccactgtgcccggccggaaaaaatgatttcttactaatttttttttctttttttctttttttttttttgagacagagtctcgctctgttgcccaggttggagtgcaatggcgcaatctcggctcactgcaagctctgcctcccaggttcacgccattctcctgcctcagcctcttgagtagctgggactacaggtgcccgccaccacgcctggctaattttttgtatttttagtagacacggggtttcaccatgttagccaggatggtctcgatctcctgacctcgtgatccgcccgcctcagcctcccaaagtgctgggattacaggcgttagccacctcgcccagctttgttactaaaaagagaaagaaaaattgcctgtaattccatcacctggattcaaccactttgaacatcttctggtatatccttgtatgtatttcctggactttttagttagaaaaacttaaatccagccgggcgcggtggctcacacctgcaatccgagcactttgggaggggctgaggtggatggatcacgaggtcaggagatacagaccatcctggctaacatggtgaaaccccatctctactaaaaatacaaaaaaattagccaggtgtggtggcacgtgcctgtagtcccagctactcaggaggctgaggcagaagaatcgcttgaactcaggaggcagaggttgcagtgagccgaaatcacgccattgcactccagcctgggtgacagagctagattccgtctcaaaaaaaaaagggccggacgcagtggctcacacttgtaatcccaacactttgggaggccgaggaagacggatcacaaggtcaggagaaattgagaccgtcctggctaacacagtgaaaccccgtctctactaaaaatacaaaaacaaaattagctgggcatggtggcacgcacctgtagggcagctcccagctcctcgggaggctgaggtgggagaatggcgtgaacctgggaggcggagcttgcagtgagctgagatcgcaacagagcgagactcctcaaaaaaaaaaaagaaagaaaaagaaaaagaaatgcctactgaatctctgccctgggtttctgagacagaacttctaagaccctttcagacagaggcaggaggagtcttttattgtggtatttggtctttgaccccggttcctgacatagagctcctaaaacctttataatctcctaacccataggatcatctgacatggggctcccaatccccttgaatttcctgggtgacaggagcgtcttttgttctaatgaggcgactcctggtgggctcctggacagccttggggtggggggttggtggcagctactatgtgatcagaagggcagagcttctagccccacttgcagcctccaggagggacaggggctgaaggctgagctgatcaccagtgaccaatgatgtaatcagtcatgcctacgtaatgaagtctccataaaacccaaaaggacagggttgggaggtttccaggtggcggaatgcttggagggtcctggaagctccctggagaggcctccagatgaacagcattgcctctatctgctgttcatctgggtcctttgtcacacatggggaaacataaataaagtgttggcggagctcggtggctgacgcctgtcatcccagcgctttgggaggctgaggcaggcagatcacttgagctcaggagttccagaccagcctggccaacatagtgagaccccatctctacaaaaaatacgaaaattggctgggcgcagtaggtcacgcctgtcatctcagcactttgggaggccgaggcaggtagatcatttaaggtcaggggtttgagaccagcctggccaacatggtaaaactctgtctatatttaaaaaaaaaaaaacaattggctgggtgcggtggctcacacctgtaatcccagcactttgggaggccaaggtgggcggatcacgaggtcaggagatcgagaccatcctggctaacacagtgaaaccccatctctactaaaaatacaaaaaattatccaggcgtggtgatgggcgcctgtagtcccagctactcaggaggctgaggcaggagaatggcgtgaacccgggaggcagagcttgcagtgagccaagatagtgccactgcactccagcctgggcaacagagcaagactctgtctcaaaaaaaaaaaaaattggctaagtgtagtggcacatgcctgtaatctcagttactggggaggctgaggtaggagaatcgcttgaacccaggagaccgaggttgccgtgagctgagattgcaccactgcactccagcctgggcaacggagtgagactccatctcaaaaaaaaaaaaaaaatgagttgggcgtggtggtgcacatccgtaatcccagctacttgggaggttgaggtgggaggactgcttaatcccaggaggttgagggtgcagtgaactgtgattatgccgtcacactccagcccgggcaacacaatgaaaccccatctccaaaagtaaatcaataaataataaaatgaggaaagtgcttccctgagttctgtgagccactccagcaaagtcacaaaactggaggaggggccatgggaacctcggttggccagagggcgggtgacacctgctacatttggtcatctgtcctcaggttccacacccaagtattcaacaaacctcagactgaaaatacaaaaaatactggcccggcgcggtgggtcacgcctgtaatcccagcacgttgagaggctgaggcaggcagatcacctgaggtcaggagtttgagaccagccaggccaacatggtgaaaccccatttctactaaaaatacaaaaattagccgggcgtggtggtgggtgcctgtagtcccagctacttgggaggctgaggcaggagaatcgcttgaacccggaaggcagaggttgcagtcagccgagatcgtgccactgcactgtagcctggcgacagagcaagactcagtctcgaaaagaagaaaaggccgggcgcggtggctcatgcctgtaatcccagcactttgggaggctgaggcgggcggatcacaaggtcaggagatcgagaccatcctggccaacgtggtgaaaccccgtctctactaaaaatacaaaaaattagccaggtgtggcagtgggcgctggtagtcccagctactcgggaggctgagacaggagaatggcgtgaacccgggaggcagagcttgcagtgagccgagatcgcgccactgcactccagcctgggcaacagagcaagactccgtctcaaaagaaaatacaaaaaataaataaataaaacaataaataaggccaggcgcagtggctcatgcctgtacatccagcactgttgggaggcggaggtgggtggatcacctgaagtcaggagtttgagaccagcctgaccaaccaacatggtgaaatcccgtctctactaaaaataacagaaattagccaggcctggtggtatgtgactgtaatcccagctactccagaggctgaggcaggagacttgcttgaacctgggaggcggagattgcagtgagccaagatcatgccactatacttcagcctgggtgacagagggagactccatctcaaaataatagtaataataatacaaataatacaaatttaaaaagcaatactatgtaacaactgtttacatagaatttacataccaggtgttataagtaatcaagaggtgatttaagtccagaggagggggttatatgcaaataacatgccattttgtatcagggactctggccttgtggattctggtgttttggaggtactggatcccatcccccaaggatacaaagggacagctgtacttgggactggcatctgaagtggaggacactcttgtgggactgagaccttagcctgcaggatcgggtactgtctccagggagaaagcgtcacaatggaacagggttggaggacgcccagcgggtgtccgcggagactggatggaaccgggttggaggacgcccagcgggtgtccgcggagactggatggaacagggttggaggacacccagtgggtgcctgcggagactcgctggagcagggttggaggatgcctagtaggtgtccactggagacttgcttggtgtttggggaaaatccccacacacattttggtgaccagagatgaagtattccatgttggatgttgactgttgagtgtgtgagagcagggaaaacactgtttttttttcctgtctcagacaccagcccagccctggagtcagccgtgtctcccaggaacctggttccttgtgttgggggaatggcatcagagaccaagacatgggggccaggcacgcttgttgctgctgtggtatacattcacaaacgttaacaaatatttttatttttacttatttatttattgaagatggggtctcgctctgttgcccaggctggagtgcagtggcatgatctcagctcactgcaatctccgcctcctgggttcaagagattctcttgcctcagcctcctgggtagctggaattacaggcacgcagcaccacacccagctaatttttctatttgtagtagagacagagtttcaccatgttggtcaggctggtttcaatctcctgacctcgtgattcacctgcctcggcctcccaaagtgctgggattacaggcgtgagccaccacgcccagctggctttctttttttaagtacagagtttaaatttgtaatgttgtcacacagtggaagttccctgctttcagtccctgaatagcaaaggctatgccttggccatcgctgctggaagagacacggctcagtgttggatgaatgtcctgactgttttcgccccagagaatgaaaggcgccaaccgtcctgggaaaggtgagaagtcagcgtggacaagctggggtgaccatcactgcagagctacaggccagcgtcctcttcgtgtcctagggctcgttttgttcctggtcctgcaggacagcctggggtcaccgtcactgcggagctacaggccagcgtcctcttcgtgtcctagggctcgttttgtccctggtcctgcaggacagcctggggtcaccgtcactgcggagctacaggccagcgtcctcttcgtgtcctagggctcgttttgtccctggtcctgcaggacagcatggcagcgattgaccgattgaccattaggtgagctgcgcctctttctctttcggcacaaatgtgggaagaaagggtttatttgtcggtgaaatccctttgggcccaacccacaagtgtcctgttcagtgagcctggtccccccagacacacaccaccatccgccctcaggtccctttcagccacctcagaggagcaaacatcacgcctgccagactgcagtgctcaagccagagttggccaagagccagcacctcgcatgtggctcccccagctcccacagcacggcaggggtcccagcaaagtctccccagacagggtgacagccaggcctctttcgggctccccagccccctctccctcccgagctctgtccttgtggggagtcctgtccaaggccctgcctggaggtctggctctggaggccccgagaaggaggccaccagactcccccggaccccttctctcacctccagccctcggtctccacatctctgaccttgtcgtctccattggctgctgggactccatggattccctccagagaccacataggagtgctccacagggggatcgtggacaggccacttggctctgcctggggtggcagacacctgcccacgggcaccagtcctgtctgggtattctcaggcccagggcagccctgactcattggcacagagagtcagaccccaggacatgtccccaaggcacagggtcctacggtcctggccactctgggaatggagccgtggccgcagggcaggtgtgaagctcaggctgacgtggccccgtgtcctctgacccttatggtcacattgcctctctgggcctgtttctttgtaaactggagtatttattttattttattttattttttgagtcagaatcttgctctgtcactcaggctggagtgcaatggtatgatctcagctcactgcaacctctgcctcctgggttcaagcaattctcatgcctcagcctcccgagtagctgggactacaggcacccgccaccacacccggctaattttttggtattttcagtagagacggggtttcaccgtgttagccaggatggtctcgatctcctgacctcgtgatccacccgcctcggcctcccaaggtgctgggattacaggcatgagccattgcgcccggccttttttttttttttttggtatttttagtagagatggggtttcaccatgttgcccaggctggtctcaacctcctggcctcaagcaatccacccacctcggcctcccaaagtgctgagattacaggcgtgagccaccgcgcccggcctgtaaactggcgtttataatgaaacccacctcgtagggctacatacaattggcatggaatgctttgctcagaaagctccacccacaaccatgcccaaggctggcattggtgtgaccttggtattatcaaaactacagagattcatgggtacgtttgtgtgtgtgttttgagacagagtcttgctctgttgcccaggctggagtgcagtggcacaatctcggctcactgcaacctccaccttccaagttcaagcagttctcctgccgcagcctcccaagtagctgggattacaggtgtgtaccaccacaccctgctaattcttgtagttttagtagagacaggatttcaccatgttggccaggctggtcttgaacttctgacatcaagtgatccaccagtctcagcctcccaaagtgctgggattacaggtgtgagacaccgcacctggtctgtttttttttttttttttttgagacagggtcttgctgtcactcaggctggagtgcactggcgcgatcactgctccctgcagctgtgacttcccaggcttaagtgatcctcatacctcggcctcctgagtagctgggaccagaggtgtacatcaccacacccagctaatgttttaattttttttttagagacggggtctccctttgttgcccaggctggtctcaacctcctgggccaaagcgatcatctcacgctggcctcccaaagtgctggggtgacaggctagagcttcatgtttttgccccaggaatcccacatctggggtttagtccacagacatacttgccctcatgcaacgtgatgaccacacgacaaggctatgcacgtgcaccctttgcacctgcgtgtgccgcagagccctccgcaggccctggactgtcacacctgcggcagctcactgcgcgccccgaaatacagtgtcaagaggaggagacaccagtgtgtagtgtgtagccatctgtgtaaaagaaaaaaatgcatgtatgtcaacgtgtgcacctgtttaccggaattttcacgaaatgatctctgggaatatccacaaggtaacactgtttgcccttggaagcagagccagggaacctgagctgtgggggaaatgggcattcgccctcatatcttctgcatcttttgaattttgaaccatgtgcaggaatgacctagtagaaagaaataaaatgcaaatgtttaaggaattgtcagctgggtaggaagtgttctggattgataaagagttttgaaactagggagtgggcgtggtggctcacatctgtaattccagcactttgggaggctgaggcgggtggatcacctgaggtcaagagtttgagaccagcctggccaacatggcgaaaccccatctctactaaaaatacaaaaattagctgagcgtggtggcacatgcctgtgattccagctagtcaggaggctgaggcaggagaatcgcttgagcccaggaggcagaggttgcagtgagccgagattgtgccactgcactccagcctgggagacacagcgagactccgtctcaaaaaaaaaaaaatttattttttatttatttatttttttgagacggagtctcgctctgttgcccagactggagtgtagtggtgcaatgcaatctcggctcactgcaacctctgcctcccgggttcaagccattctcctgcctcagcctcccgggtagctaggattacaggtgcatgccaccacacccagctaatgttttatatttttggtagagacagagtttcaccatgttggccaggctgatctcaaacccctgaccttgtgatctgcctgccttggcctcccagagtgctgggattacaggtgtgagccaccacgcctggcaagagttttgaaaccagaaacgggggtcacacggcactctgagtgcgacagatgccgagtcgctcacttggaaatggctcatcctgttatgcgaatttcttcccaaaaaaaataataaaatgaaaaggggccacgtgcagtggctcatgcctgtgatctcaacacactgggaagctgagcagggaggattgctggagcccaggagttcaagaccagtctgggcaacaaagggatattccatctctacaaaaaattaaaacagtagccgggtgtggtggcgcgtgcctgtaatcccaactattcaggaggccaaagtggggaaattgcttgagccccggagttcaaggctgcagtgagctgtgattgtgccactgcactccagtctgggcaacacgatgagatcctgtctctaaataaatgaataagtaaaaagaaacgcagctggtgccatccgccctgggaagtgggtatctgcagaagggttgaagggaagcagggcccctccagaagaccctgctctgagtctgtgcatccaagaaggggtcagagttggagagtccccacggcccctccctttgtctccctgctgctgtggggctggggaggggaggtgggggagggagaggaggggagagagggagggagaggagggaggggagggagaggaggaggggagggagaggaggaggggagggagaggaggaggggagggagaggaggaggggagggagaggaggaagggagggagaggagggaggggagggagaggaggaggggaagtgtgaagcaaataaacacgcgggcagggtgaggttcttttttgtctctttaaaatcatttttaaaaagttacaaaacaatatcattcatcatatattcttattttcctttttttaaaaaattaaagtaataaaaaagtcactttataaaataatataaaagggcttgatgggtggggccggtgggtgctgtctgagctggtggactgaggaatccagtgcttctcttctggctaccccctcgttgtcaggaaggacccccaggccacagatggggatgacagcaggtcccttgtctctggctgggctgtgggagaggggcagggaaagccggggcaggagggcagtgggcagacccagacaggggggacggctggggccctgtcccgaagagacgggagggcctgctggtggggggtgaggtggcactggggcagcgggtgtctgggcccctcagtgccggctcctcctccagacagtctgcctagcttccgttgctcagcatccccagcagctcactgggctccagtccctgcggctgggccaccgtctgcatgtcgaagcccatgtgcatgaggaactgggccacgttcatctcttgccccgtgaactggtctcggacggtggggcatgaggggttgcagtggggccaggggcagctgtccaccaggtggacggggcagcccttgaggggggtcttgctggccttgtggctgtcatggaggctcctgtcccagcagtgcagtgctcggggcagcgacgtccccttcacctggacatccgtccagtggctgcagaggaaaaccgggggagggggtcacatgtgcggagtggcatcaacactgaggcagctgtttttttttttgagaccagccatggcaggatctcggctcactgcagcctccgcctcccgggttcaagcgattctcctgcctcagcctcccgagtagctgggattacaggcgtgtgccaccgagactggctaattttttgtattttcagtagagatggggtttcactatgttggccaagctggtctcgaactgacgtcaggtgatctgcccccattggcctcccaaagtgctgagataacaggcgtgagccaccgtatctagcctgggtttttttgttttgttttgttttttgagacaaggtctccctctgcctgtcaggctagaatgcagtggtgtgatcactgctcactgcagcctcaacctcctgagttcaagtgatcctcccacctcagcctcctgagtagctgggattacaggtgtgagccactgctcagcctgagtctttttttttttttcttttttttttgagatggagtttcactcttgttgcccccaggatggagtgcaatgttgcaatctcgactcaccataacctctgtctcccaggttcaagcgattctcctgcctcagcctccggagtagctggattacaggcacccgccaccacgcccagctaattgtatttttactagagacagggtttcactatattggccaggctggtgtcgaactcctgacctcaggtgatccacctgcctcaacctcccaaagtgctgggattacaggcgtgagccaccgcacccagcctgagtcttaattcttgccatacagctgttggtacaagtggctctggcacccctataaggaaatcccacccctagaagcgccaagaagaggcccatgggaggccaagtgcggttggggagcatgtggacttttgaagttgatgtcatggacgcaagctgcccggagcagggacactgacctccggatgatgatctcatgggagaggcaggcgggggcaaagctggccctgttggagaggagacagtggcttgtgagctccttaccccctcagccccttttccacccccactcccctagagctgtcccccgcctggccatcaccccttcctgttgctatggctgccagctgttcctctggcccgggcctccccctagttggccagctcccggctgacccttatcgctttgtgcctcaaatccctgctcagagtccacctcttccaggcaggccctcccaggtgatggcaagaggctgccctagacaggcaaatattctgctactatctagaactctattttcattttattttgagtcggggtctggctctatcgccccagctggagtgtagtggtacaatcgaagcttgcttgcctcccacaggcaaggttagctcactgtaaccttgaactcctgggctcaagggatcctcctgcctcagcctcctgagtagctgggattacaggtgatgccaccatgcctggataatttctgtatgtgcagtagagacacggtttcaccatgttgccctggctggtcttagactcctggcctccagcaatcctgctgcctcggcctcccaaaggggtgggattataggcgtgagccagtgtgccaggcccaagaccgatctcgatctctctctctctctctctctctctctcctctctctctttctctctctctctatatatgtattttttgagacagagtcttactccgtcacccaggctggagtgcagtggcacaatctcagctcactgcaacctccacctcccagttcaagtgattctcctgcctcagcctcttgagtagctgggattacaggcgcctgccactacaccggactaattttttgcatattttgtggagatagggttttgccatgttggccaggctggtctcgcactcctgacctcaggtgatccacctgcatgggcctcccaaagtgctgggattataggtgtgagtcactgcgcccggcctacaagacctctatttttttttgttctggtttttcttcttttgttttctcaggacctctatttttaaataaggagggagctacccggcgtggggctcccggggcccacacactcacggcacgtccttgagtgtgtggcgcagctcgcggccgaggttctggatgtacagccgcaggccctcctgcaccggctgccccgtcaggtgcacgttgtccaccgtcagctgtgcctcgtcaaacagccactgcaccacgaacacagggcctgcgggcggcggggctcagttcggcctcccctgacccccgctgctgcccccaccccaggctcacagctcagcacccccaggcccctgcagtgcccccaccccaggctcagagctcagcacccccaggcccctgcagtgccccccaccccaggctcagagctcagcacccccaggcccctgcagtgccccccaccccaggctcagagttcagcacccccaggcccctgcagtgtcccccaccccaggctcagagctcagcacccccaggcccctgcagtgccccccatcccaggctcagagctcagcaccccccaggcccctgcagtgccccctatcccaggctcagagctcagcacccccaggtccccgctgctgcccccgaccccaggcagagctcagcaccctcccaggccccctgcagtgctgctgaggctcacaggccagctagccttggcccaactctccccaggggtgtcagtcataggcccccacagaatgtggcttccttctttcaaaccagcctttttataatccacagcttcataactaaatcaataactaaatcaacaactaaatcaataaactgcctttccttgaagacgggctctgtttaacccctccatgaccttggcctggttctcagcgactccactttcacctaaatatggtgatgatgcccttgcatataacctcaccattcctcagagcgtggggctggggaggaactagcccaggaccctgcagcagggaggggcagcatggggatgagctccaaagcacactagccaccggtataggcagggtgaccacctgtcccactttgcctgggactgaggggtgtcagtgctgagggcaggcaagtcccaggcatgccgcagcgactaggccccctggcacacagccggcctcctccctggtacacagccggcctcctccctggtacacagccggcctcctccctggtacacagccggactcctccctggaccagggccgtggtctccaagcccagcccagaagactggagtccacgctggattttcagaagcaaggaagtgtggccacccctgctgccctgtgtgctccgctctgccgcccactcacagcgcagggtcgggtagaccttgtagccaaagaagcagttccactcctcgccctcctggaactggcgtcggcagcgctccgggaccaccccgttccagtacctggagccacagccacaggttaggctgccgtgggtctcgtcccccggggctccccacccacagatgccactccacccaggcccttctggggcaaagctgcagcacgaggacgggccctccccgctgcggcacctgatgccacggcggatggcctccgtgggcgcgcacgtgatcgtgtcgacgcagtctgtgtggcgatactgcttgttgtccaggaaccagccggagtcagccaggcctcgcacctggatggctgggtagcccagcttctccagctgctcagccacacggtccacattcaggagcaccccggtgccccccgcgctgcaaggagggccagacgtgaggccaggtggctgggaagaggcactcacctcccccgagtctgctcagcgtcagcccgtgccccgaggggggcaggagtcctgatgcgttctgaactgcggatgcattctgcattctctgttcacgtgcaagacccatggccgtcccctccagagcaggccagggctcaggctggcaggccacatttccctgacacagccaggctctccccttcctcctccccttcctctctctgtctctttacctcaggttccttatctgaaaatgaagataaactatgtggcctcaggccccatcatctattccccatttgtctcctggtctcctgtatgcctgctgggatacaggaacccacaggggtgatcctcatctaccgggccctggagaaggagcattagtccatggccaacccctaaccaacgacttaggtccctgcagcccaaaccttcccctatatccaacaaccatggcgtccagaagcatcctctggacagtgtctggttacccagcactctgaagccaggcctcagagacgtctccaatgatgcgggttctcccagctccagcctctcaccctcctagccacctgccaagatctgcacaggctccactccatcctcgcctctcatacaaccccaccccacaccccttccatgcaccctgcacaccgtcctcacccctcacctccagccctgccccgccctgcccacctgctcccggccagcagcagcaccttggccccgctcagccctctgcccagaagctcccgcaccacctcctggatgatgagggcgcccatgaaggcgtactcgtctgcaagagggagggggtggcctcaggtaggggcctggacagagagaaccacctcctaccccagaatggctggcagagaagttcttgccccactgggggactgggaggaatcttctgagaaggggtcaggggcttgggtggactggaggaaggcgggtgcaccaggccatgctggggcctcctccccagggaatattcagaaataaggacctcctacagttgtggacaagcaggcagtgggagcatggggcaggcaccctgggacatactgtcaagggctttgaaagcacgacaaggctgagagtcagcttttccccagaacccctgccgtcccgcctcatccctgccctgccgtcctgcctcctccctgccctgccatccggccccgtccctgccctgccatgccctgggaaggccgagactcactcttctcagacttggatgaagccccgctccaaacatcactggagcagtaggggatgaagctgcaacacagaacagagtgagcctgtcacagcgcctgccgcccggcagcctccagaaaggacccccagaacaggaccctcagaaaagaccatcccaggacaggattcccctggaaggaccatcccaggatagaacttcccctcaagaaagacctccagcgtaatactcctcaggaagaaccaacccaggacaggaccctttccaggaaagaccaactcaggacaggaccccccaggaaagaaggaccatcccaggacaggatccccctggaaggaccatcccaggagaggaccctgccaggaaggaccatctcaggatagacccctccccaccaggaaggaccatcccaggacaggacctcctccccaccacgaaagaaacacctccagaacccctctaggacaggacctccccaaaagaaccatccagaacaggacccccaggaaagaccatttcagaatatgacttcccaaggaaggaccccccgggaagaaccaccctccaggcaggactcccaggcaagaccctgtgcccccttacaccatgtttgcgttccaccagtaggggttctcctccggctgtgaggacaggatccctgtgcctggggacacagaggcggtgggtctttctagcgggaggaggctgtgtagggtcgggtctgggaaccctggtgaggtgttggggctcctacttggccccaggaagggaggtgtgctggtgttgctagcccgaaccaaggttgccgggaaagtggaggacagttgggtttagttacccccgggaagccaccatggccacggtgcccggctaggctggacaccaggtctgaccttgacttcaaccccttgccctgctttgaccctggggagggccagagccgctgggtaagcgcctgaatgctaatgtggaatgggccccaaaaggcaagagtgaagggcgccccttgctcttagtaaacccgggcgccaggctgggcatgatgtgcggggtgggggcctggctggggctccaggaggcgggcgcggcttcctcccgggcctcacgtcgagacgccttccccagggcccgccgctgacctgtgcgagtgcgcggccagtcccgggagctcatgaggcgccgcatggtgtcgtatctggagtcgcagttctcgcggttgaagcagtaccagccgcctgcggacacgaccgccgctcaggcccgcgcgcacagacccccggcctccccccgcctcagccctggacgcaccttccaggaagaggagccaccgccggctgcccctggactccttcaggtagtagctgcgggggaggacgcaccgcggggggtcggccagggctgccgacccgccgcgccccgcgcgcccagctccggcggagggaacgcgccacctgttccggccgcgcgcgacggtcgcacgggggcgccctcggccaggcccacggggagctcagggacggcggcggtcccgggaggtggcgctcgcggggcggggaacgggccgcgcggggctgtggtccgtggaaaatccccacgttccgcccggcgcgggtcccgctgtcacctcggcgcgggcggcggtcctcccggggcgcgcggcggcgcttgaagcgtgaaacgcgtccgcactgaaggagcgcgcttggcgggggaacgggacgccgcggggagcgcgggaggcgcgggcggcaccgacccggcgggggagccttcctgccgagccccgaccccacgcccaagtctcccgctgtccccggctgtcctcggcctgttgagcgcgtgggcggccccgccgctccccgacccccgacctcacgtcttttatctacttcggggctgcaaggaggtgggcagcgggcctctccccgccccccggtgtcgccggttcccgctggagccaggcgcgctctcgggctgccatctccccgccccgggaccgaaggacgccagcagagcggctgggcccagaggccgaggggtcagtgcccgagctggccggggaccagcccttccagcgccgctccgctccccacgcggagagtcaccgaaccgggcactcctcggggccaggaccgcggggcgcccgacggaagccctttctccccggggagagaacggccgcggcccgcagggaaggtccagccggagaccgggcgcgtcgggcggggcggggaggtgcagggcgcgggccttacccggcggggctgccgtcgttgcaggtcaccgaggtgttgagtaggaggtgcaggcgcaggtcctcgttgagctgctgcgcggagcaggggtacagggactgcgccaggctcttgacttgcgccatgaagctgtccatgttaccctccacggccgtgaagtccagcgggaagctctccacgggctgtccggccgccggcgccgcctcggtccgcgggggaggaggcggctgctgaccccggcgccgccaggtcttcctgccctcgctgcccccggcgcagtgcagcaggctcagcagcagcagcacgcgcacccctcggcccatggccgcgtccacctgcggggagcgggcggccttgaggcggcggcggcggcggcgggggatgccgggccgggggtgccgggccgggggtgtcgggggcactggccgctcctgctccctcgcccccgctcccgcccgccgggcctggcggagaaggcgcgcgcggctcggcgtcgaggcgctcggggccgggtgccgtcggcctccgcagctggggctccgcgcccggccgtccgagggcagcgcagggtctgggtgcgctggctgcggcccgcgccaatgagcggcgggggccgaggctgggcttatttgcgggggccgcggcggcccgggtgcccgcgcgttagatgtgccgccgccgccgcccgggctcggcggaggggggagggggccgcgctcgctcttttcttggcggaggcatcgccttttcttcccaaaccgcaagcctgacggaggggcctggactaccccgccgcggccgccggaggcgctcccggcccggctccgtgggggggcagcgcggccgggcggccccggcggctccattcaccgcggccagcccggcgccgccgcccccccccgcggggcagctggaaggggcggcggcgacggggaggggcgaggcttttccgcgcctgccggggtggggggcggggaactccgcccgcggcgcagctggccgagcccgacgggctgggggcgcggggcaggcgcgctcacctggagccgccagtgtccctctcatcccccagtgcccaggcccagagcaggccgtgggggattcggaccccggcccgcatcgccccacctcgcgcagccctggggccccgctctcaccgcggccagcgcgggcggcccagtggccccgtcctctcagcgcccctggccctgcgccgtcccgctggtgcgcccggctcggctgcgctccccctctggcgctggcgcggagccgccagggacttttatccagcagggccccccgggatcaaagcggcggcggacacagggcttccagccgagggcccggcagcagtggcgccggggcctcctggagaagcggacaggtggggcgcgaggtcctggctccctcggagacctgcgggagggaccgcgcgccccagcaaggcgccgcgggggagtcgctcagttccggggcgctcctgctggcgctggggtcagagaagcagctacgacttaaggagatcgcggggccagaggtgaggtcctggatctccgcccgccccagcctggctgctggccccatgccgaggaccccccaagaacctgccccagccgccactgggggaggaggccaagggtccagtggctgcccgctaggcctctgcttgcggcccttcatgccacgaagggcacctgccccatgcttcaccttggagagcacccctgtccactcccgaggctctgggcagtggggttagaacaaggttcctgtgggaaatcagtactggagcagggtggacaggaggggttcaggaggtttcctgctggggtgagcgcgggtgggatggacaaaagaaaggaaaggacatacgcagggccagcggggccgggcagactttctccttcaccctccggtctgaagcctgctgggcgccatgacacccattttaaaaataggaaacaggtcttacgtttcaggacaaccaggtcttacatttcaggacaacgatctagacacaagcagagcttccagagcccctcctaattcaggacagtggggagcctacggcaccacgtggggcaggagagcagaggcgcagggcggtgcctgcagccaggatgcccccgagccgccggccggggccatgtggacgtcctccttgccagccccgggctgagtgaggagcttagggagaaagtcccagcgccgcctgcacccgcagacagccgagttacctgggctcttgtgaaacagagagaccaaacgctgggagctgttgccccgcgcattcgatgggtgtaaggcaccccagtgtaaaccacaaggcctaagatcaggctggggtgccctggaggtcagcctaacctggggacattctcagagggaggcaggctgtcacaaactcaggtccctctccccacagggcaggttgcagcattttcctgacgaggggaactgaggttcagggacactaacagaagagctgaggctcacccttagctctctgctcactcagaaatcccccctgctgtccctccgccgtcgggtcagtttaaaagccaagtgtggggctggccaagggcagtagcttcagacgcaggtcccatcctgaggcgttctcccacccacaccccggcggggaaggctgacccagggcagatttcagcgtccagcaggaacctgtccggaggaggcctctcccgccgggcacctgttattccaagtccggagcgtgatggcatcttccagctggctgcacagggttgatcttcacaccgccctggctctgagccatctcctggtgcagtatggacatcccagggaaggcctgtgacctttccttatgcctgtgcttcctctcatttatttatttatttatctttttgagacagagtcttgctctgtcacccaggctagagagcatgacgtgatctcggctcactgcaacctctgcctttcgggttccagcaattctcctgcctcagtttcccgagtagctgggactacaggcgtgtcccatcacgcctgcctaacttttttgtatttttagtagagacggggtttcaccgtgttagccaggatggtctcagtctcctgacctcgtgatccgcccaccttggcctcccgaagtgctgcgattacaggtgtgagccacggtgccccgccgcttcctctcctttaaagcggggtgataacagtgcctctgtcagagggctgttgtgggattataagagcccacttgtgaaattgcgcggtaggggtggcagtcatgatcaccgatgaaaattccaggacgggagaagaccatgtgcgttacagtttctgacgtctcctgtaatgcgatggagcctgcatgttgaaccgaaatgagttcacattttggtttattcaacactggtagcagacgccagaagaggctcaaacccaagacttccccagaacctctgcccttcctccacctccccccattcccctctcctccgaagccccttgccgtgaccggatgactgacaaggctgcagtcctacggccggggacggggctcccgaggctcagcagctgctcacacccatgtcctcctcttgactcacaccgactggctctgtcctcacacttccccagcccctgggacagctttatcctctgcacctgggactccccacccggagttttgagcacccagagcctggcagcagctcccgtggcgggtcctatgggccagcaggtgctgggcctttgcttccaggccacctgcatcaagatgggaccaacctggccctgacaggtataagaaagggggacccaggtccatcagtaatgggtcagatgctacctcatgcccactaagatgaccacgatcaaaacacagaaactaacaagcgtgggtgcagccgcggtgacacagaagccccagagcatcgctgtggggatggacagtgcagtggccacgtccctcaccatggaaaacggtttggtggctcctcagtatgttacacaaaacacgtgacccagcaggcccactcccagggatacacccagagaattgaagacaagtgttcaaacaaaaactggctcatgaatgttcacagcaggactagtcacagtagccaaaaggcggaaaacagccccaaagtccatcagcagatgagtgggtaaacacaatggaacacagccatacaacggaatatattctagccgtaaaacaaacgaagttctgacatatgctgcactgtgggtgaatcttgagaatatcagccaagtgacatgaactggacactgaagggcacatgcggtatgagtccattcatttcgagtgtccagaagaggcaacttcatagagatagaaagtccgctggtggtttccaggagatggagagaaacagggagtgattactaatgggtacaggatttctttttttcttttgtttttttgtaagacagaatcttgctctgtcacccaggctggaatgcagtgatgtgatctcggctcgctgcaacttccgactctaaggctccaacaattctcctacatagctgggattacaggtgtgcaccaccatgcccagctaatttttgtatttttagtagacatggggtttcaccatgttgatcagctggtctctgacctcaggtgatccacccacctcggcctcccaaagtgctgggattataggcgtgagccactgtgcccagctggtacggggtttctttttggggtgattaaaatgttctaaaatggattgtggtaatggttgcacaattttctgaatgtactctgtcatgtgattagatttttttttttttttttttgagatggagttttactcttgttgcccagactggagtgcaatggctcgatctcagctcactgcaacctctccctcccgggttcaagcgattctcctgcctcagactcctgagtaactggaattacagacatgcgccaccaggctcagctaatttttttttttttttgtattaagtagagacggggtttcaccatgttaggctgatctcgaactcctgacctcaggtgatccacctgccttggcctcccaaagtgctgggattacaggcatgagccatggcacccaccctgatattttaaagtagttagttctgactgggcacggtggctcacgcctgtaatcccagcactttgggaagtcctggaagaaggattgcttgagcccaggggttcgagaccagcctgggcagcacagcaagatcccgcttccatctaaaagaatcagtgggtaagaccaacaacgatcaggctgggcacagggcaccaggtggcggggatgaggcctgaggccccgtgagcggagtggccagcttggggtggagtgggccggctcctctctagaaaccttcctggcaggtagggtgtttcagaaccctccttttgcatgttagacagatatccactttgtctgcaccagagcggatgggttaggacagccaagtaccggctgctgcggggcctgcagttgcgtctcaggttcctcgtctgtaaaacgggatgagaacagcacctgcctcacagagtccgcgtgaacatcaaaggtgcaggatgtttgggggctccgctcggcgtctccggcgatgaccatgtgataaatgacagttatgctgcccaggcgtcgtgggattgcaggcgatcccccagggaccaaggttgactgcgagggcagacatgggggcctggcgacgagagcaccacagtgcccatcccaggctgcatggttgcgtgtggtgtccctcacagggtgtgcccttctctgcttccctggccctgccccatccccactgtcctgttcagggaggaccatacagggttccccaggctcccattcaggtggcgccggggcttctgactgagcctagactctgtgtgccccgcggcaggaaagctggggaaacgaaggcccagaggggactctgtgcttcaggagaggcaccccgagacaggacggggtgagggttctgttcaccgccttcccctggggagggagctggggatgcacaggtggttctgagtcaatccgccggggtcacggctgtgctggggggccggagccccccccctgggaaaaaggggtcaagacagcacatttcaggaagcaagggcccaagctggcgggcaggcgcagtcggagagggaggaaggtgtgatggagggcagctggcggtacaggggtcccctcgagacctcgcgtggggccctggaacttggtgatatgagcgtccagcacacagcatgtcaggcagccccagacccggcttccttgtccatactggaggcggctccctgccgcacatcccgggcccctccccccagggccttgagcgccagggccgctctgggctccagctgctgccagccgtctggggcccagctgttgtgtgctggcctcggccgccccgccccgcctggccacctgggctgccctgcgccccagctgctggcctctgaggcccaagtgagcagggaagtgaggcgggccacccgcttccccatgtggctggctgttgggggaggccgccgcttcccccttggctggctcttgggggaggccctgctctccaaccggctcagagtgggggaggtgccgaggccaggcggtgccgtcgcagagcatggcccctttttggtttcccccaacctccttttctggtcaccccatccatcagaaggacccttcttggcctcatatcctgggaccttgatgagccaagtcccttgtcaggagctgctgtggctctcgcccaggtccttggaggggcgaggggggcccctgggcggggcggctgctcctgggcttggtgttggggctgccctctccctggccccagtgcctgggagtgagtggcctctggattccctggtggaaaggatcggccttgccctaggatgtccttcacccaggtgagagctcctagagcccagcggggaggccgaggctgtcatttttggacccaggtatttggcgggatctgcccctcttggcacccctgcagctgagctccgccccatcccgcctcctccctacggcttcacccggctggtgccaacatgcagcctactgggctaaccatggagtggcagggccaccagggaaaggccaccctccaaagctgggggaggaagggcatggggatgggggagtcccagctcatcagtggagatgccgcctcttgggacatcacgcagacagtgtgtggctccttcctggacaggtgagggaggctggaggtcaggctcccgggtgccaaggggaggggcagagaggctggtcctttgccctcccagctgccaggctccaccgccctcacgagctgcaggccgcggcccccacccgtccagcctgctggtccccacgctcctgctcctgccgcaacagcggcagcaggccagggaggccatgtgaccttcgctcgccctccctccctccctgtgatccccacgtggcctctggggaggcagaaacaaaccctcagatcttgccactgggaacctttcagcgccagcgacatcaaagaggggcggcggcggcgggggcggccggcggatgcttctcttaaagggccacgccacttttaattcaaagcagatcctgggagcagctgtctagctgctgtctgggagggaaggtggcagccgagccctctccagacctggctgcagttgctccttagaactagttcaaccaggctgggtgcggtggctcaagcctgtaatcccagcactttgggaggccaaagcagggaaaacacgtgaggtcggaagttcgagaccagcctggccaacatggtgaaaccctgtctgctaaaaacacaaaaatcattacagaaagaaaactcatgggatgaaaaaaaaaaaaaaaatcagccaggcatggtggtggcgcgtgcctgtaatcccagctacttgggatgttgaggcacgagaattcctttaacccaggagatggaggttagagtgagctgagatcacgccactgcactccagcctgggtgagagagtgagactctgcctcaaaaaaaaaaaacaacaaaaaaaaactagttaaaccggagaggggtggggacggagaagaagaaccagcactatgccgcccttagaactgaggctgacaaggtcccaagtggccagacggcagcaaggtagaaactagattcgtttaatgaaataaatagtgtgagccctctcgcacatttatgtatgagctgcgattcttttatgattattatttttagagacaaggtctcactctgtgttgccaggctggactgcagtggtgtgatcacggctcaccgtagccctgaactcccgggctcaagtgatcctcctgcctcagcctcctgagtaccttggactacaggcttgcaccaccacactcggttactttttaattttttttgtagagatggggtctcactatgttgcccaggctggtcttgacctcttgggctcatgtgatcctcccccttagccaccctagatgctgggattacagccgcatgtcaccctgcctggccctgaggtgggattgtgaacctgcccaggtgtctgtcctgcctagaggccactgactgaggctggaagtgaggcagctccatgagccacaggaaggttccctgaccacctcccattcatttgcctgagccctgtcccaggcacggggacatggggccgggatggcaggtgcacctttgcagggcttgtcttctggaggaagcagatgctgaaaagtagctgttcaaggagctccctgacagggtgacaggggaagggaagacaggaaagccaggcagaagacagcccctgtgctgggcattcagtgggcctggcaagggcctgggccagccctgggattgactttgtgcagccttcggggaggaacccaaactcatcttctggcctggctcaggcttcctgcagcccaccggggactcactgcctgcaatgacctcttggccttcctgtgccaagtcagggtccactcacctgcctggagggtgctacaggtgaggatctgaggcctgggcaggcgaggctctatgttggaggccagcacagaccaggtcaaagttcagttcggtgcaggtagggggctggacctggtgcctggaccattccacgcctggacactgtggcctcccatgcaatgtccagcagtgagcactttgtgcttttgacttagtgcatggtggagaagagtggagtcataggtggccgcagagtggggtcatgcgtaaatctttgaaaacgtgggtgggctgcagtgataacagcaaaagagactgtgatatcctgtggtcacctgttgtataaggaggaagataggttaagaatctacatctggctgggcgcagtggctcacgccggtaattccagcactttgggaggctgaggtcggcggatcacttgaacccgggaggtggaggttgtggtgagccgcgatcacgccactgcactccagcctgggcaacagagtgagactcagtcaaaatatatatatacatatatacatacatatacatatatatacatatatatacatatatacatatatatacatatatacatacatatacacatatatacatatatatacacatatatacatatatatacatatatatatacatatatatacatatatatatatacatatatatatatatatatttgattccaaagtataaagacatggcctgacctgtttcttctcccactcatcctcatagaaaaccattttcttttttttctctttttagagatggagtctcgctctgttgcccagcctggagtgcagtgttgtgaccacagctcactgcagcctcaaactccggcctcagcctcctgagtagcttggactacaggcacacgccaccacgcctggctaattttttttttttttttttgagacagagtctcactcagttgcccaggctggattgcagtggctcgatctccgctcactgcaggctctgcctcctgggttcacaccattctcctgcgtcagcctcctgagtagctgggactacaggcacccgccaccacacccagctaatttttttgtattttttttttagtagagacgggctttcaccatgttagccaggatggttgcgatctcctgaccttgtgatccacccacctcagcctcccaaagtgctgggattacaggcatgagccactgcgcccggccaatttttttttttttttgagacagagtctcgctctgttgcccaggctggagtgcagtggtgctatcttggctcactgcaacctccgcctcctgggttcaagcaattctcctgtgtcagcctcctcagtaactgggattacaggtgtgcaccaccacgccgggccaatttttgtatttttagtatacggggtttcaccatgttggtccggatggtctcaaactcctgaccttgtgatctgcccatcttggcctcccaaagtgctgggattacaggtgtgaaccactgtgcccggccaagaaaaccattttcgttaacttctagggtagcctgcttgtttttctttttgcaaagatgagcaaattcctgtgtcaggtgccaggtgggcacatatgtagattttttttttttttttctgagacggagtcttgctctgtcacccaggctggagtgtgagtgcagcggcaccatctcggctcactgcaacctccacctcacgggttcaagagattctcctgcctcagcctccagagtagctgagatgacaggcacacaccaccacgcccggctgatttttgtatttttagtagaggtggtgtttcatcatgttggccaggctggtcttgaactcctgaactcaggtgatccacccgttttggccttccaaagtgctgggattacaggcgtgagtcaccgtaccgcacctgaatcaaataaaccttttgaacaatgaaaatatagcactataaaaaaggatgaagaaaaaaccccaaatttagtaaaaaacaaaataaataaatgtaacctaaccgtgcatcaaattgttaaacggacctaacctacctataatggttaattgtatgtgtcaacttgaccaggctaagggatacccagagagttggtaaaacctcatggctgggtatgtcttcaaggatgtttctggaagaaattagcatttggatcagtggcccaagaagatccaccctcaccacagcgggcaggaatcatccaatcagttgagggcccaaatagaacaaaaaggtggaagaaggacacattctctcttcttgagctgggacgtccatcctcctgcccttggacattggagaagggcaacctgcttctcaggcttttggactccaggacttacaccagccgcccatcctacacttctggggcttcaggatgggagttacacctctcgctcccctggttctcagacctgcagacttggattgaattaaattatattgtaattatattataaaccaatgtattgagttatacactggttttgggtattgagttatacactggtttgagtattcagttatacactggtttataatacactggttttcctgtctcaagcttgcagacaaccgaccatgggacttctttctcagcctctataatcatttgagccaattcccataatacatttcctcttttttttttgagatggagtctcactctgtcactcaggctggagtacagtggtgtgatctcggctcactgcaacctccacctcccgggttcaagtgattctcctgcctcagcctcccgagtagctgcgactataggtgtgcagcaccacacccggctattttttgtgttttcagtagagatgaggtttccccatgttggccaggctggtctcttgtatatatctgtgcatatcctattggttctgtttctctggaggaccctataatacactaacctaacctaacacagaaaagcaaattaattcaaataacttttgaacacaatactctatgtttctttaatgggacatactctaaaggacaaaaatagctacaaagacatcttgaaatttccacagtagatctgttgttaatagcaagattgccgcagtacctctgaaactatttggagggcattttagaacaaagcaaatgaataaatatactgatttactgacaattagggttctcactgcggacaaaggaggtattaggttgaaccatgtaggttttgtcatttttttgtagatcaaaaatgatcggctgggcgcagtggctcatgcctatctataatcccagtactttgagaggccgaggtgggaggatcacctgaggtctggagttcaagaccagcctggccaccacagtgaaaccccatcgctactagaaatacaaagattagctgctcatggtggcaagcgcctgtaatccaagctattcaggaggctgaggaaggagaatcgcttgaacccgggagatgggggttgcactgagccgagatcgtgccactgtattccagcctgggcaatagagcgagactctgtctcaaaaaaaaaaaaaaaaaaaaaaaaaaaagcctgggtgcggtggctcacacctgtaatcccagcactttgggaggccgaggcaggcggatcacaaggtcaggagattgagaccattctggctaacatggtgaaaccctgtctctactaaaaatacaaaaaattagccgggtgtggtggccggtgcctgtagtcccagctactcgggaggccgaggcaggagaatggcgtgaacctgggaggtggagcttgcagtgagccaagattgcgccactgcactccagcctgggtgacagagtgagactccgtctcaaaaaaaaaaaaaaagaagataaaaaaaggttaactagggcaatttaatagaattcaaccaaatacaaatatggaatgagggaagaagggggagaaggctgaggtgtggcttagaaatattcagatgaattcatcacactaattgtgtcccctgagagggcccagaaagcagtgacatcccagtagccatgagcacactcagcacccagaacttggtctctaaatcccatttccttgtaaaagggattggggtttctctgaaaaatggctgacttcagggcttgggcagagaggagatgcccaaagaataatggaaatgccaaaaggatgcaggaaagatgtccacacttggacaattaactgtggattaactcagagtatgataccaacattagatttcccaattttgtatgaaattatggtggctatataagagactggccttattttatttatttatttttttgagactgagtctcactctgtcgccaaggctggagtgcaatggcgtgatcttggctcactgtaacctccacctcccacaatcaagcaattctcccacctcagcctcccaagtagctggaattacaggcacctgccatcacgcccagctactttttgtattttttgtagagatagggtttcaccatgttggccaggctggttttgaactcctgacctcaggtgatccacccgccttggtctcccaaaatgctgggattacaggcgtgagccactgcacctggttgagactggccttattcttaggaaagagaaaaactgaagtatttagtggcgaaggtgctcaatgtctttactgcagcctcgacctcctgggctcaagtgatcctcctgcctcaatctctcaaatcgctgggactacagggacatgccaccatgcctagctaacctttgtattttttgtagagctggggtctcactatgttgcctagggtggtctcaaactcctaggctcaaatgatcctcctactttggcctcccaaagtgctgggattataggtgtaagccactgtgcctggccagaaaaagtttttacatgtatatggagagagagaaagagaatatgataaaacaaatggggtgacatgtaaacactgatttatctggctaaaagatatacaggaggctgggcgtggtggctcacacctgtaatcccagcactttgggaggctgaggcgggtggatcacgaggtcaggagattgagaccatcctggctaacatggtgaaaccccatgtctactaaaaatacaaaaaattagccgggcatggtggcaggtgcctgtagtcccagctactcgggaggctgaggcaggagaatgatgtgaacccgggaggcggagcttgcagtgagccgagattgcaccactgcactccagcctgggcaacagagcgagactccgtctcaaaaaacaaaacaaaacaaaacaacaactagctgggtgtggtgctgcacacctgtagtcccagctactcgggaggctgaggcagaagaatcgcttgaacccgggaggcagaggttgcagtgagctgagatttcgccactgcactccagcctggcgacagagggagactccatctccaaaaaaaaaaaaaaaaaaaaaagatatacagcaggaattcttgcttttgcaaacttttcttctctttcttccttcctcctccctcttcttctttcttctccttctccttttttgagacggtatcgtactacgttgctcgggctggggtgcagtagttattcataggcatgaatagtggttcactaaggctggaacttaagtaattctcctgcctcggccaccggagtagctaagactacaggtgtgagccaccttgctcggctaagtttgaaataatatcaggataaaagatcatccctcctatcaaaaaaagcataggagccagcttaaaggaggtctcactggccaaattcggaccaatttgagcatcaaaaagaatgctgactgaatgaaaaaaatacatgaattcatattaataaatatatatatttcaagatggggtttcactcttgtcgcccaggctggagtgcaatggtgcgatcttggctcgttgcaacctccatctcccaggttcaagtgattctcctacctcagtgtcccgaatagctgggattacaggcacgcaccgccatgcccggctaatttttgtactttttttttaagtagagacaggatttcaccatgttggccaagatggtctcaatctcttgaccttgtgatctgcccaactcagcctcccaaagtgctgggattacaggcgtgagccaccgcgcctggccatatttaattttttttttttttttttttttgagacagagtcttgctccgtctcccaggctggagtacagtggcgtgatctcagctcactgcgagctctgcctcccggattcacgccattctcctgcctcagcctcccaaatatttaataactttttaaagaaggggaagcttgaccgaaagtgactataaatgtagaagaaacaataaacttgggaagccatgattttgcagctttacggtttaacactgaatctactcattaactgatgctaaaactgttgggcaaatggttattgggaaaacttgatgcttgtggtctcagagaatgacctcacgcatgccttaattactccacaaggagccacggaccttgaccatggaggaattcagcagacccaaagctgaccaagtggttcaacttcacgtcctcactcatggccacgctgatgtcctgcacctcctgctgacttgtcacctcccttcatcattgccccaaacgtttaaccaaggatccagactgtgggacagtctaaggaaaataggaacagactcttcaaaaacgccactaaagaattaaaacccaccaggtgatgtgtggctcagtaaggttctgaggttgcacagagcatgggactggctggctggatgggagggctatggctagcctggggctttccccaggtttctccaatgtacatagatgtccgtgtttgtcagcatacaggtgtgtgtgggtgacatggatatgtcatcgacaggaaggcacaacagcacccatgcagagatgtccttagactcagcaatgactgccgggtgcggtggctcacgtgtgtaatcccagccctgtgggaggattgactgataactgcaccagttcccccttccacaggctactgggcagctgagccctagccaggagtccgcagagacaggcaggcacatggagagaggagtgccaaggcccggctgagccatggaggtggggggcggggcggaacacgtgcgagtgctgtccatgagtggcccaggtgctgggagctaagcacattcgacggctgcgagtcaggagggcagctccttctggaagcctggagctggtgaggccaggtgctttccctgctgcggtggctggcgatgggagtgtttcctgaggctgccaccaagcccctcctcagcatgggttggtgcgggaagtccttgagtgcctgtgggtcggcaggagctccggtgagactcaagttcgctcaccccacggttctgaaaccggtctcccgcctttcctaccctcaggtttagggaccgtcgcggcagccctagggctgccagattctgcactcccattttaggatgaaagaaatcaggtctagactgagggccacgagtcccaacacccagggaggatccgtacaggggcggggggactgccccaaaccataaggtcaggaggtggacgctgaccacagggacaggtgggcagggaagaggctcagctgctggagtggaggaagccgggagggtcgggggagagcagggcaccgagctggggacgtgtcagggacgaagcgagggtgggcgagcgcggaccgctgggaccccggggctcagtgccgctcaccgggggtgaccgcgcgcccagccccggcccagcctggccccggcgagcccatccaagccgcgcttcccggaggcagaggacgaccgcgctttccgggtctggcgcgggctttggcggcccaagggcggggccggggcgccgtgggtggggaaagggcggggcctggcaggacccggaagtgcgctgcggccccgccccctggccgcgtggctgcgcgtcctggctgttgccgataaagttgtttgacgccggcccggcggcgggtcacgtgagcggaaaatggcggccccggcaggcggcggaggctccgcggtgtcggtgctggccccgaacggccggcgccacacggtgaaggtgacgccgagcaccgtgctgcttcaggtgcggccgcccgcccggggcggacgggtaggcgggcggggggcgctgcgccgaggccccgcccattgcggtcggcgtcccggtgttcgggggcggggcctcggcggccaatgagcggcctcctgagcggcggccccgccccctgctcgccgtcacctgcgcttccgctggggtcccgggggtcccgggggtcccgagtgggggcggggcggtggcgagccttcccaggggtgaggtagaacggcgccgcgtgtcacccgcatcgagtactcggcgcccggccgagcccagctcgcgagggcgccgggaagagggaggagtggagccctagacccgcgttcccattccggggcgtcccccggagcgggagcccgggttgcgcggtggcagatgtcccggccgtggggcctggaagcgatttttgccgagtcactcactgcacttttacttgggcaccttgtgaccgcgaatcaattaaatgtaaaagtattggctgggcgcggtggctcacgcctgtaaatcccagcactgtgggatgccgaggcgggtggatcacgaggtcaagagatcaagaccatcctggctaaaacggtgaaaccccgtctgtactaaaaaaatacaaaaaaatttagccgggcgtggtggcgggcgcctgtagtcccagctactcgggaggctgaggcaggagaatggcgtgaacctgggaggcagagcttgcagtgagccgagatcgcgctactgcactccagcctgggagacagagcgagactccatatcaaaaaaaaaaaaaaaaagtatttattgagcctctgctgcgtgggggaccgtgaggatccgaaggtgcacacgactcggagtttgcgggagcagcccacggcgtggggtccccaggcctgggcaggtggagggcgcagccaggaggctgttggtgccaggcgtgcagagtgcggaagtggggcgctcccgcagaggctgcgcgggaccccttggtgcaaggccacggctttggctttttatggagaagaggggcggaggcggtgcaggcagtggcagcaggtgcacagaaccgtgccagagccagggggtagcttgtgctaggcaagtttaaggcaggttgcagaactacagggtttgaaggagagcccagggtgtgtgccaggaagatgcccgtgttgctgtactgcaggggaactctgagtggagctttcctacaaaactgaggggatggtgaagaagggagggagagtggacaggatttgcaggtgagagcctgcatttgttgcggggaccgtccatagtgtggtcttgtgcttggctttgcctgggcagagccacctggctcaccaggaagctgaatgcccttggctgacctggcccactgcgcccgccagccctgcacactcagcagttcaccatcctttcatctcacccccaggttctggaggacacgtgccggcggcaggacttcaacccctgtgaatatgatctgaagtgagtttgctccagctcagcagcagggtctgagtatatctgtgcccctgccccctgaacatactggctctcacttggaaaagcccccaggtggttttaaacagtcatatattccctcccaactctggagacccaaggccttggcagggccacactctctccaaatgccctaagggagaatccctcctgcctcttccagcttctcatggctccaagcgttctgtggcttgtggccgcattgctctctgcctccgatttcttgtggccttttcctgttttctctgtgtctcaggaagacccttgtcattggatttagggtccacttggataatctagaacgatttatcattacatcttcaaagaccaggatccctagtaagatgttcagaggtcctgggggtgaggacattgacccatcttttttgggggggccaccattcaaccccctgtaggttttattgcattgagttgcataagttcccagtggggctctgaggggaaagagctggccgtggagaaataggatgccttgaaaactgcaggtggatccctgcagtctcacagcccctggaattacacgtacgcttctgtgtggggatattgttcccaagagagggcttctgccagactctcaaggagtctgagacagcagaagggtcagagccctcatatggataggatgtgcgtgtctatcccacacgcgaagcttttcactttaaagtcctgttttctggtgttttttttgttttgttttgtttttgagacagggtttcactcttgtcgcccaggctggagtgcagtggcacggtcttggctcactgcaacctccacctcctaggttcaagtgattctcctgcctcagcctcccgagtagctgagattagaggtgctcaccaacacacccagctaatttttatatttttagtagagatggggtttcaccacattggccaggacggtctagaactcctgaccttgtgatccgcctgccttggcctcccaaagtactgggattacagagatgagtcaccatgcctgcccttgaagacctgtttttacagtactgttgtcctaacactgggggcagagggcaggagcttgccctcctggcattgcccaccctgccttacgaggctctcctgggaggagtttcttaggggtgatacctgccaagtcattccagtcttctaccttgtgtctggaccacgtgagaatcccaggacctgtgctctgaatgccaggtggtcttgggctttctgccccagaccttcacaccatccttctccagtctctcttgtcaactgaagaatgcggttcatatgtttggaaaggagggctttatttctcataaccggttgcagcttgcagggtggccattctaacaggctgggaagtgtagcctccagccagaagctggaaacagacacttcaagagagggaagaataagacagggatttacaccgaatggggtggctgatacagacgtacttaatacgctgtaggaggatcatgagtattcatgaaaggagaactgtgcacacagttgagcttcctgcctcttcacgggtcctatgtgcaaaaaatggcagtgccagcatgacctgagggtggaatttttggcctctgaagtcagaggtgaagcaggctgggtgaagtggctcatgcctgtaatcctagcactttgggtgcccgaggcggaggattgcctgagcccaggaattcgagatcagcctggggaacatagtgagaccctgtctctacaaaaaaagtaaataagtaaataaataaataaatggcaaatcagaggacatgaagactgtgccacgaaaaccctgactgtgccagaaccactccatggttggtggtttcttatcaggaaatacctgtgggttgttttgaagaaaccgcaagagagaagggcctggcgggaggttggctgatgtcagataccagcccaggggtctttggaaagggctgctttctgtttatcccttagggaagagagcctgcagatgtgtctgatctcccacccagccatggccaggaactcagctttcaaggtttctggggtcccctgggccaagaggaggctggttcagttggttggggggggcttagggtttcatttttatttcttttttattttattattttttgaggtggagtctcgctctgtcacacaggctgtagtacagtggcgctatctcggctcactgcaacctctgtctcccaggttcaagtgattcttctgcctcagcctcccgagtagctgggattacaggcgtgcgccatcatgcccagctaatttttgtatttttagtagggacggggtttcaccatgttggtcatgctggtcttcaagtcctgacctcaggtgatctgcccgccttggtcttccaaagtgttgggattacaggcatgagtcactgtgcctggccatttttctgaaacagagtcttgctctgtcacctaggctggagggcagtggcatgatctcagctcaccgcaacctctgcctcccgggttcaagcgattattgtgcctcagcgtcttgagtagctggaattacaggcacgtgccacgcctggctaatttttgtatttttagtagtgacggggtttcaccatgtggaccaggctggtctcaaactcctgacctcaagtgatccgcccgtcttggcctcccaaagtgctgggatgataggcgtgagccactgcacctggcctcatttttctttcttttttttgagacggagtctcgctctgtcgcccaggctggagtgcaatggcgcgatcttggcacactgcaacctccgcctcccgggttgaagcactcctcccacttcagcctcccgagtagctgggactacaggcctgtgccaccatgcctggctaatttttgtatttttagtagagacggagtttcaccacattggccagactgctctcaaactcctgacctcaagtgatctgcccgtctgggcctcccaaattgctgggattacaggcatgagccaccgcgcccagcgcattgttacttctcagtgttcacctgcccgtggtctgtgtggtggtgtctggtgggaaccagtgagtgcgattttgaggcaggtcctgcaataccatagccatgttttcaggtgcccttttcctctgctaatggtaccacttgcttacaaagtgcagccggtgcagaggaatgcagccccaggcgtgaacagtgccctccgctccaaggttcccagcctgcctgccctcgggatcccccgatctgctatcctgtcttgacgtagacatttcatgtggcaatttccagactcacttttctggccagtgttgatatagcaaagtttgttctctcttaattcttccagatgcccctgggctgtctgaactctcttcactagttgtctccgacagcagcttgcatttccaaagtgaggccaaccactttgagtatattcagatttttcttttcttttctttctttttctttcttgttttctctttctttctttctttcttcttctctttttctttttcttcctttctcttttcttttcttttctttcctttcctttccttttttctttcacagagttttgctcttgttgcccaggcaggagtgcagtggcatgatcttgcctcactgcagcctctgcctcccgggttcaagcgattctcctgcctcagcctcccgagtagctgggactacaggcctgagccaccatgcccagcttatttttttgtatttttagtagagatgggatatttttgtattttcagtagagacggggtttcaccatgttggtcaggcttgtctcaaactcctgaacctcaggtgatccgcctgcctcggcctccgaaagtgctgggattacaggcgtgagccactgcgcccgggcagtcaggttttctgtggtggctccagccgtgacggccggggtctgtgacactccagcttccgcgagtgcagcagtgttcacgccccagtcgttctctctgtgttttccgagcgtctgcactggggctgtcagcaccccagactctgaaggagcagccccctcggcgtgcaccgaggcccacatctccctttttcctgctcccttctgcttgcaggaggccccatatgatcggggacccgccttgtgcctctgcaggtcatgacgtcccgctgttggggagctgccacaggacgtggatggcggggcgtggatggcggggcgtggatggtgggacggggatggcggggcgtggatggcagggcgtgtcaggctctgcagggcagcaagtgtgctctggtctgtcttgcaggtttcagaggagcgtgctcgacctttctctccagtggagatttgccaacctgcccaacaatgccaagctggagatggtgcccgcttcccggagccgtgaggggcctgagaacatggtgggtcgtgctctgggggaggctgactgtgtggggcacaggatcgttcagctggccagggacgggggacgggacagtggggggtgctggggaaggagggacatgagtcttagcaccagttctgccttccctgggttgggcccaaacagcttcctgttttttgataactggcaactgaaaatgagcatctcatgtttttttttttttgagctggagtctcgctctgtcgcccaggctggagctcagtggcgcagtctcggctcacttcaagctccgcctcccgggttcacaccattctgcctcagcctcccgagtagctaggactacaggtgcccgccaccacacccggctaatttttgtattttagtagaggcagggtttcaccatgttggcctgctggtctggaactgctgacctcatgatctacccgcctcggcctcccaaagtcctcccaaaggattgcaggcgtgagcctctgcgccccgcccacgtcattcttcatgtggaagtttttctttctttctggggtcagttgtgccttccctggctcagggtgtcagcagcattcacccaccagcctgaccacctgctcatagaattgcccagaatgttagagccgaaagcgctgcatggatgccgcaagggcagcctgtaatcccagcactttaggaggccgaggcgggcagatcacctgaggtcaggagtttgggaccagccggccaacataatgaaaccccgtctctactaaaaatacaaaaattagccgtgggtggtggcggatgcctgtagtcccagctactcagcaggctgaggcaggagaatggcgtgaacccgggaggcggagcttgcagtgagccgagattgtgctgccactgcactccagcctgggcgacagagtgagactttgtctcaaaaaaaaaaaaaagagcagcaaacatttaccatctcatgtggcttctgagggtcaggaatctgggagcagcttagctcagtgtctgtcctgaggctgcagtcaggttcggtggagctgcaatcttttgaagcccccactgggacacgaggactgtctccaacacagttcactcctgtggcgcctgcatgtacccacacacacccacacacacccccacacacccacatacccgcacacccgtacacacccccacacacccctgcacacaccccacacacacctgcacacccccgcacacacaccccccacacacacccacacacacccctacagcaacgtgcacacacccccacacccgcacacacccgcacacaccccacacacctgcacacacccacacacctgcgtgcacacccccccacacacctgcacacaccgcccacaccaacatgcacacacctcccccccacacacacccacgcacacacctgtacacacacacctacacatctgcgcacatacccgcacacacctgcatgtaaacatgcacacacacgcacatctgcacgcacatgcgcacacctgcacacacccacacaccaacatgcacacatccacacacatacctgcacacaactgcacacccccgcacacacccacacacacatatgcacacacgcacgcacacctgcacatacctgcacactcacatgcacacacgcatgctggtgcagccctgccggggagcctccaaggccctcactccagagtgaataggagggtagccttctccgtgggggtcagcctctccctggaggccagggcggggcagtcaccctctctgtgtctggagaatcagtctgggatttagaaggaatagttgcttttcttcctaaggaagtttctcatgtcttataccctccaggttcgcatcgctttgcagctggacgatggctcgaggttgcaggactctttctgttcaggccagaccctctgggagcttctcagccattttccacagatcaggtgagcatcagtgggctgggggctcttccctaccctgtttgctggggaagctgctgtggttactgggtctggttcagagctggacacccaagctctgtgctggcctgtggtgcctcttggcactttgcagtcctttgtagaggaggggtgtgtgggctgccggttcatgagcagcagcctcggggatggctggtcacagctcatcgttctgagtttcctgggcccagcggcccagccttgcccacctagaagagcaggaatgtgcttctgtccttgtgggggcctggtgagcactaaggggagacgttcggtgctgggggcagggctccccatgcttgattcccctggatgggatcataaggtctcttttttttaagaggcagggtctcactatgttggtcacctaggctgctcttgaacccatgggctcaagaaattctcccatctcagcctcccaaagcgttgagattacaggtgtgagctcctgtgccccaccagaaaatcttcctaatagtaattggatggctgggcacagtggctgggcacagtggctgggcaaagtggcttgcactttggaaggccgaggctggcgaatcgcttgagctcatgagttcaagactagcctcggcaacatagtgaaaccccttctctacaaaaaatagaaatgttaggccaggcatagtgcatggtggtgcgtgcctgtggtcccagctatgccagaggctgaggtgggaggatcacttgagccgtggaggcagttgcagtgagccgagatcgcactgctgcactccagcctgggcaacagaacgagactctgtctcaaaaaaataaataaataaaaataagtaattgatgtgtatcagtttctgtcggttaatggtttaaacgttgttcctgaatgtgtaaaaattggtgctttgtcaatttgggtcttttcatcgttggctggaagtctctgtccacagtaaaaggctcagcagaatggaagggacttggggctggggtttgctgtgagccagggggttctcgccctccccgggcctcagtttcctcacctgtgccccggctggtgtgtggatggggtgagttcatgtcttgaggaccgagcatagggcctgtgggaaggtgaccgcgcgtcgggcgctgggaaggtgactgtgcgttgggcgcgcttggtggccccagggctgggcctgctcccgtctgacagtagtgccgcgctgcatggcacgggtgttgcgttcgtgggtgagagcgctgaggtctgcacgtcgggtctcagtggtcatggggatggaagccaccccagtggctgtcggggtgaatggaggcccctggagatggcagcgggttaagcacgagcacggaattctccctcccaaaacggaactcagacaacagtgacggagcctaagagcaaagccaaagccacgggcaggggtgagcgggacccgaggcaggagatgacggagcctaagagcaaagcgaagccacgggcaggggtgagcgggacccgaggcaggaggtgacagagcctaagagcaaagcgaagccacgggcaggggtgagcgggacccgaggcaggagatgacggagcctgagagcaaagcgaagccacgggcaggggtgagcgggacccgagccaggagtggcgccgggcagggaggcaggcagccccaggcgctgtgtgggcactgggtgagaagcagggatcccggcgccctggctctgtgctgcttcctgagacgagagtggcagagggcaagaagaaaaccaaacagcgcggggaacagaagtcaggaaagatgaacgtctggaaggaaatgcccctgggccgggcggtgcccccgggcgtgaacagaatccagtgctcccacaggcacaggtgcttggtgagggccgtcctccctggctgtgctgtcagtcctcagatggggatggaggtaaggaaatggcccagagtggcctggggctgccactggggaggggccgagggtgtctggagaggtggggccggcattgtggtagcataagcctcttcaacagactttgtaaacctcgtgtgaaacttagtttaagaaacaacaggcttggccaggcgtggtggttctggaagtggctttggagctggctttggtggtggctgtgggggtgggtttgggcgctttggaggaggttgcagtgagccgagatcgcaccattgcactctagcctgggtgacaagagcaaaactccatctcaaaaaaacaaaaaaacaaaagaaacaacaaggctgggcacggtggctcacacctgtaatcgcagcactttgggaggctgaggcgggtggatcacgaggtcaggagttcgagaccagcctggccaatatggtgaaactccatctctactaaaaatacaaaaattagccgggcgtggtggtgggttcctgtagtcccagctactcaggaggctgaggcagaagaattgcttgaacccaggaggtggaggttgcagtgagccaagattgcactcagcctgggcaacagagcgagactctgtctcaaaaaaaaaaaaaaaagaaacaacagaagtggctgggcgtgatggctcacgcctgtaattccaaccctttgggaggccgaggtgggtggatcacctgaggtcaggagttcgagaccagcctggccaacatggtgaaaacccatctctactaaaaatacaaaaattagctgggcgcaatggctcatgcttgtagtcccagctactcaggaggcaggagaatcacttgaacccgggaggcggaggttgtagtgagctgagattgcgccactgcactccagcctgggtgacaaagcaggactccgtctcaaaaaaaaaaaaaaaaacaagagcaagtggggcagctctttcgagacaccagggacagcaggaggtggtggggccgttggtggtaaagcccggagcccccagcctgcggccctggtctgtgtggcagtgtgggtctgtctgcgggtgtgtctgcacgtacacctcatttgatgaacactcacacctgtggtggagagtgatttgtggctgactgttgttgctggtgaatatgctgtggacatcttcctgaagggtcccgcacctgtcactcctcacagccatgctcttccgtcgtgtgggtgtcatgtgggtgttgcggggcatctggctgtgtctcagggcatcccgggcagggttgcagcagagtgtgcagctggaggcctttgcacctggtcacccaccccagcttctcctgtgggctaaattccagaggtggaatttaagatagggcttcttcacatttcatttccaggccgggcatggcggctctcacctgtaatcccagcactttgggaggctgaggcagatggatcacctgaggtcaggagtttgagaccagcctggccaacatggtgaaaccccgtctctactaaaaatacaaaaagcagctgggtgtggtggtgagggcctgtaatcccagctacttgggaggctgaggcaggagaatcacttgaactcaggaggtggaggttgcagtgagccgacatcacaccactgcattccagcctgggcgacagagcaagactctgtctcagaaataaatattaaataaatttctaaaagctcagacccaagctttgtcccagaagctggagtttgctaaccatggagcaggatatggacgaggtttcatagtgggtggcgttgccagccccacggtgagggtggagtgcctggtgggctctctgctgggagctggtccccagcaggtctgcatgagggagggaggctctcgtgcctagtgtccctgcactggcccaggaggcttggggaggccttgggaagtccaggtgtccgcagagtgggacgggcgggaagctgatgtttcttctttcatgtgtttcggaggaggtctgagtccagggacagtgtaggcgctgtgcttcgaaggggcgttctgaggctgggggctgcaggcctgtagcgtgcccaggagttgccctgggacagagcctgctttgtgtatttggggacccctgggtgatttccttggatggacactgccacgtgtttgaaacgttgcagctccactgcgagggtgtcactgtagcacgcagccctggcccgaccagcgtctcaagcagcaggggcctcagggataccagcgagccacacgtcggccatggaggtgactcacattttcttttctttcacccaggctggagtgcagtggtgcgatcttggctcactgcaacctccgcctcccgggttcaagcaattctcctgcctcagccacctgagtagctgggattactggcgcacgccatcacgcctggctaatttttgtattttttttagtagagacagggtttcaccatgttggccaggctggtcaggtgatcagcccgcctcggcctcccaaagtgctgagattacaggcgtgagccaccacacctggccaatcactcactttttcttgtaaccgcattaaagaagaaataaaaacaggtgtcattaattttagtaatacgtgtagttaactcagtatacccaaaatacgacttcctggacacgtagtcagtagaaaagtgagccgtctcatgctcttgttgtgcagagtccttgagacctgcatgtatggtgcacttggagcatctcggtctgggccgggtcctcgtggactgggcgctctccactctgcttctcaggctctgctgcagggagggcgtcaggagacagaggctgcacactgctggcttcgagctttcccattttccctatagtctgaaggttctgcccagcacagaggggtgtgaacagccacgccgagctctgggggacactgctctccgcctgcctggtgggcctgtgtctgagtttgggatcttccacgccgagctctgggggacactgctctctgcctgcctggtgggcctgtgtctgagtttgggatcttccacgccgagctctgggggacactgctctctgcctgcctggtgggcctgtgtctagtttgagatctttattacggggagtgtgccttccgtgataggagacgcatgagatggaaatgaggatttcatggcctacgggccctgggggtacacggccctcctggaggcacccggaggaggaaagggagtacctttctgaccagcatctttgctggggtacagattgttatgctaacgggtttcctatgaggagtttctctccatgggtttagagccagcaggcactagccccaggaggtcatactgtgactcgggggatactgtagcacgtctgggcagtccacgagggcaggcgggcgagtcccgtagtttgaatcccacgtcccgtaaggacctagttgccaagtggtgaaaggcaggggtgtggatggaccatgctgagctgctgggagcaggaagagaaccggggactgttgtgggtgaccgagacctgccgtggaacgatgccaagggtgagccgtgggaactcacacagcagctgagccgctttccatctgaagaccgtgagggagcagggtgggctttctgtaaatcagattcatgagctcagccatggaggggatttgtcctctctcagaggtgcccccgggctgtgctggcgtgggcaccccaggtgggagtggcccccagtgtgcccggcccctggctggatctcttcccaggcccccagccctctgctcccagccttgactcagtgcttgggggctggctgagtgcatctcagcctgttcctccttctgtaggtaaagccgtggctccgggaaagctgggtgatttctgcagccctctgggtgtgctggggtgtagggatgggctgctggtgaggacagggctctgccaggtggagcactggcctgtggccacactcagggtgggtctgtgcatgctgctgggccagctcagagctctgcggcccgtccctgtccatccctgcccgtccctgttcatccctgtccgtccttgtccattcctgtccatccctgtccatccttgtccatccctgtctggacctggctgggttgagaaggccggagcctgccccaggctctcccaggctctgtctagccgcttggcggctgggctgtcatgtggtgggtgatgccctctgcgggcctccctgagcccagtggctcctggcctgcagccacagcttctgttcccggcagggcgcatgctgctgcctgggctctcgtcagcacctgtgtttgcgcccggctttgtcatacccagacaggacatgaacacagagagctctagactcactgccttgtccccagcacacagccgcgccttgccggagcggggccccagcggggcggggtttgtggtgcataaagaatatgccctcgaagccagcagcagaggcgtgtctgccctcctggccgtcccgctggcttctggccctggccgggtggggagctctgctggctggagagtgtgtgagagtgtgccagtaccctgctgcgagcaggcacccgcggaagcgccccaaagcacttcttgcatttctggcttcggagcatggtgtctggtggcttggcctggcctggggtccccgggaggccctgggtcttgcccctgcggacattgggacttgcagaggtctgcgtgggggagggggagtaggggctgtgtctcctcgggcgctggaatttcccccgggccctggcgtcctgcacactgggccggcgtagaaggtctggaaccgattgcccaccacccctccctgagatcccgcatgagggagggaatctgatccctctggaggagccgcacatcaaagccgggctggcgtttgatgtcacgctgctgtgctctgtccctgtttgtgatttgaggtccccaagctggcggtcagtgccggggaaggactgtgagttgggactctggccacccctcagcccaggcctccccagccgtagagaagtggcctcatgaccatctccggacccctggccatctgtgtcatgctggggagcggggaccctgggccctccctgtcccccttcctggccctgggggctgtgcttccttgaggcctctctctgcctctgtccgggttctgctccggcgcattttgaggccttgtgttttcctgagccctgcgtctcggggcctctgggccgagtctccagccatttggagggaaggcaaatccaaggccctttgttggctgctctgtgggacgggagcttagggagtgtgtcccagcctgtgcgcagaggacacccgccgtgtgtgtggtgcgcacgtgctccacaggctagaggcccttggggaaggggctcccctgtaggcagtggacccagggagaccatggggctaagtccacgaccctgtggggcctctgcagccagaccaggctgtcagagtcggggcctgggtgggaaagggatgcccctcccccaggattgaggacgtgaaaaataaaggccacgaaacaaaagaaaacacgtcaaacccacacacgtggccgagtccccaggtgtcggggctgggcctgtcctgggtgtggcaccttgggcttttctgcttggtctgttctcatttcagggaggcaagtcctgcccttttttttgttttgttttgttttgtttgtgtttgagacggagtctcgctctgtcgcccaggctggagtgcagtggcgcgatctcggctcactgcaagctccacctcctgggttcacgccattctcctgcctcagcctcccgagtagctgggaccacaggcgcccgccaccacgcctggctaattttttgtatttttagtagagacggggtttcattgtgttagccaggatggtctcgatctcctgacctcgtgatccgcccatctcggcctcccaaagtgctgggattacaggcgtgagccaccgcgcccggctgagtcctgctctttcaagtaggtcagcagatcccagggtcggggcacggtgagtgcacagtggacccctgcggccctgtaagcacacaggtgggttcaggcggaggccgagagttcctgtcccagcatcccgctctgtgcatggatgtgcacgtatgtctcgacctggacactgcagcaccctgccctctgaccctcccagtaccccccatcccggagggttgctgcaagcagtttccagcccagctgttacctaatctttatcccctgtgttctggtcaccagctcagcctgtgtcttcctgtcccacctgagcccttgcaaggcacactggccatagggcctggcagggcacctgcatgacctgaggccggccctggcctcccctttgcctaggctctggccatctgccccctcctctcggattcccctccctggagagggactgatgaggggcatctgcaaggaaggcctgagaagggcttttgtttttctcagtggggaggatttcacggtggggagttggaaacgcagaggcaagcccgcctcatgcagcaggtgccaccagcagttcacatgctctggggctggatgtgacggcatgtgcccgtctcccgggctgccatgcacatcaggcatgtgtgggaggcgtgctgcatatacctgcccacccatgcacgggtccagctgtgcctcctgcggggcgaggctcagaaagacactggtggcagagtccgacatggacttataagcacggcctccccggccacaggcaagcgggcgtgagcggagtgcagcgcccctccctccatgcttcggtgacatcaggcgtcggctttgaaggaggacatcaggcggtggagacaggggcacctcctcttagtgggcggcttaagatgaaagcccagacgtcggtaccctgactctcaggctcctgagtacaggtgtccgtgagccgcattccggagccagtgctgctcgcccctcctgtgcggtccctgggccctgccggcagctccacgtcctgccagcggccccgagactggaggtctcggggggagcccccaggccacgcaccacaggccagggtccttgggagcgcccccggctgtcaggtgcctccttttggtggttgtggggcgcagtggggctgaggtctgtggcctgggcctgggcctgggacgctgtcctgggtgggtgctgggtgagggccccacacctttgctttccgagtctcctgccccagggcctccgtggcactggttgagctgccctggggtacctgatggtttctttcctctcctcccagggagtgcctgcagcaccccggcggggccaccccagtctgcgtgtacacgagggatgaggtaggcggcctgctcttgctcacccagtccccgctcactttcagcccactttccaactggaaaatctgctgtcccgcagccgtctccagggcagtggcgggagactcgggctcttgaaagcacgacgtgtttcatggaaaaagagggagtggccggccctcggagcccgggctgccccgaaacctccctcggcgccctgtttgttttttcagcttctctcaaagcccaagagtcacaaaagtggtttcatttaataaatatttgctttgctcggtgttttgatcattttcaaaaccgagtgtggcgtggcgcaagcaaagcccgccgtggcgggaccctcctagcgctcgtccctggcctcacaggggccttttgtttccacgctggctgagtgccctttgctggggtgggggggcactggcccggaggggccctggggggccaggacattccccgcatttatccccatttggaagctccctggctggggctgtgacggggaggttcaggtctacgtcctcccttgaggggatgagccacggggctcaggacccaggcccagcactgtcctgaggctgtggccctcagggacccttacaccctttggcttttgtgctgggccattgactgtgccctcgctagaggcagcttctccaccccttcctcacaggtcagagttagcgtatgggacgtggccagccaggcccgatccctgcccaccccgagctgagcaccaggaatggccacccccgtgggtgacagcacgttcctgcctctctcgctccgggcagtgggtcctggcaccagggcttcctccttgcagcccagctctgccagcccaggcctcagtgagcttgggtcccagctgcggagaccaggctgggggagacacggtcaggcatgggcagcaggtcctgccccggctgcagaccagactcaagctgggccttgtggagggtgtggaccggcaggggccagatgtggggggtgggtaggatggaggccagagagggcacgtggcctgtggtcctggtggtgccggtgcccggagggcttccctgggctctggggtcccggtgcaaggcgcacctgtcctggctgctcctcctgcaggtgacgggtgaagctgccctgcggggcacgacgctgcagtcgctgggcctgaccgggggcagcgccaccatcaggtaagggcagtgctgctggggccgaggagtctatttagctaaaaaaaaaagtggtctcaaaggaaaggagaaaggacacgtggcaagtggggagtaggtgtacccaggccctcatcatggagagcgcctggtggcctctgcctgcctgtgggcgtgggggctgggctgccccgacctcatctctgtgtcccccagaggggcggtggatcttgggagggcgcatggggcaggagagggtgaaccgggggcgggagagggtgagccgggggcgggagagggtgagcctgggccgggagagggtgagccgggggtaggcaccacaaggtgcttcccttgtcctctggccccactcaggtttgtcatgaagtgctacgaccccgtgggcaagaccccaggaagcctgggctcgtcagcgtcggctggccaggcagccgccagcgctccacttcccttggaatctggggagctcagccgcggcgacttgagccgtccggaggacgcggacacctcagggccctgctgcgagcacactcaggagaagcagagcacaagggcacccgcagctgccccctttgttcctttctcgggtgggggacagagactggggggccctcctgggcccacgaggcctctgacatcatcttcagctaagttgccgaagtccctctccagccctggaggcccctccaagccaaagaagtccaagtcgggccaggatccccagcaggagcaggagcaggagcgggagcgggatccccagcaggagcaggagcgggagcgggtaaaaggggctctaggccttgggacttgggggtgtcctttctcctgatgtgtagccctgcgtggctttagctggtcagcctggtggcgtggccgtgatgcgggcagaggaacccaaacgcgcagaggaacccaaacgcggggctctggacaggagccttctgacttcgcccaggaaggaatttaggggtaagcaggtggtagagaaagtagctttactgagacggtggctgtgtctgctccgggatgaggccgtgtccgctccgggatgaggccgtgtgggctccgggatgaggccgtgttggctccatgacaaggcggcaactgtgtcagctccgtgttggctccgtgatgtgtggcacagagcagggccgccctggggtggtgcatggagggcagcagctcagggcatggccgtggtcacatttacatccactcaactacatgcacgttaaggggtggggcattcagaaatctctagaaaaggggtggtaacttccgggttatggccagggaagggggagctggtgaacgcatcagccagtcttcaatctggtctggaatcaagccccacctcctacctgagcagggtcactgggcttgttcttagcttctcaggcaaatgatttttttttttctgggtttttttttttttttttttgagacagagtctcactgtgtccctaggtgggcgtacagtggcgcgatctcggctcactgcagcctctgccacccaagttcaagtgattactcctgcctcagcctcccgagtagctgggactacaagcgcgcaccaccaagcccagctaatttttttgtatttttagtagagacagggttttaccatgttgtccaggatggtctcaatctcttgaccttgtgatccacccacctcggcctcccaaagtgctgggattacaggcgtgagccaccgcgcccagctcttttttctggttttaaaccacctttactgaggcacccactttttttttttttttgagatggagttttgcttctgtcgcccaggctggagtgtggtggcgcactttcggctcactgtaacctccacctcccgggttcaagcgattctcctgcctcagcctcccaagtagctgggactacaggcgtgtgccaccacgcccagctaatttttgtatttttagtagagacggggtttcaccatgttggccaggctggtctcgaactcctgacctcaggtgatccgcccgcctcagcctcccaaagtgctgggattacaggcttgagccaccgcgcccagcctaatttatttttatttttatttttcataaagacgaggtctctctctgttgcccaggctggtctcgaattcctgggctcaagcgatcttcttatctcagccacccaaaatgctgggattacaattgtgagccacctcaccaggcctgaaagttactttttataatattgtggatagtatcatgcttcctgttacatctttgactggctgactccttgctagttctagtggcgtcttggtttctgtcggggcctctgcagacctttccctttgtcctctcatcgtttttcttcctgtgttgcagcgaatgggcctctggtgcttttggatcgtggcgatcttagtagacatccttccttgtcttgatcgtaacaggaattactagtcatttctctgccaaggatgatgtgtgctataaaaagcctttatcaagcagagaaagttactattcctaactttctgacatttaaaaaaatcttaagtgggtgttgaaccgtttcagtgttttcagcatcaatggagatgaccgtatgctttattttattggcttgtgcatgtgtgttcataagtgagacagactttttttccttgctctgtcttcatccagtttgggaatcgaatttcacctggctcacaagggagctgggcagtggcccctcttttctgggttctggaagttctccgaaggttatggccactgctcactgcagactacacccaccactggggcactgggcccttggcggggagtgcatgcaggcaggcggccaggtgctgacctccgagcatgcctgtgtgtggctgtggcctgaccctctccctcacgcctccccccaaccgtggggacctcgtgtctgtggggtccctggccctgtggctgacttttcctttgtccctgtcctgaccccgcatcagagccctgcacctgggctgctgaaacctgacttcctcagcttcctcacctgcagaactaaggtgttcgtggcatttatgggttttgtgccaaaagaggcagactgggggactgtcatgcggctttcggtgacagggatgggaggaggctgtttcccagcccctgtgtcccctgagggccaggctgccagctgccagccacagcccaggggccaggtcagagcttcttgagctcctgctgacgtagtgggcctggaaggcccccatgcctccatctcctgtggacatttaaaatatttgtgtctgggcctgtggcatggtggctcacacctgtaatcccagcagtttgggagaccgaggtgggcagatcacctgaggtcaggagtttgagaccagcctggacaacatggcaaaaccctgtctctaccaaaaatacaaaaattagctgggtgtggtggcaggtgcctgtaatcccagctactcgggagactgaggcaggagaatctcttgaacccgggaggcggaggttgcagtgagccgagatcgtgccactgcactccagcccgggtgacagagtgaaactccatctcaaaaaaaaaaaaaaaaaagaaaacaagaagtggccaggagggctctgtgcacatggccccggcctcggctgtcccctgggcactcgtgctacgtgtcccggaactcaggtgaggtcaggagtttgcttcctcctcctctggccacttctgagtgaagcaacctcatgcctccctcttgcctcccggccacacacctgggagggcagaggccgggcgtctgcaccgtgttggatgtgggggctcccatctagcccggcgtcagggtccagcccctctgttttctgtccccctggctgtcctgggactgttcctgttgagtggacaagggagtggggagtgagggtgttgggtccattctaggactatgatggtgttggcaccccatcctccctctgggaactctgccaaactctgcactgtgacacctgagtccccatgaagcgctcgtgcccctcgacccgtgtgctccgggtgagcaggggctgaccccctctaggcctgctcttgtggggacccctcagtgtgagagacacagtggctgtcatgttcccccattctagaggcgtgggcctcagccccttccctccgtgaccagggcgggtcttgtctgcagagcgtggggcgtggagcatggggctcgcagcccagagtagtgcccgcccgtgctcgcccgtcgggaggcgctgttggggtggggtcttggctggcaggaggggtccaggggagggagcgtgtgcctggcctgcatggcgtgctgagggcctttgatctgggacttgggcagctgattgatggagggcgtcctgcctgccccgcgcctcccatcgccgccagccgcacacgcagagggcccggggccacatgccgctgctgggtccctttcagtgatggggggaggggagaagggaacaaaacagaacttttttggggaacttcaaaggtacactttagtaagcaaaaagagtttccaagtttcccattaatgttttgcctgtgtgtggtttttggacttaaataaagagtcagaaggaagagacaggataaaatacaggcaggtcctcggccgagacccggggtggttcacagacccgggcggttcctgcctttgatgtcaggcattaattattagaaggtagttttactggcgatcagaaccgggcgctgggagaggctggggctgcccggcgccccctggccctgtctttgaagtgcctccactggctgggaggctgccctgcagccctgtgctgggctgggacgccagtcccagcagacgccccccacaactcggcctcccggcagctggcacgagggccgctcctgatcaaaggctgggtctgcccgcacgggctggcggctgctgccctgcctgcccctcccgcctcgggggtgaaccttgctcctggagccggggcctggggtttcctcagcacccctgctcacacccggccctctgtggctgacagccggtgtgggactcgtggggcggggaggagcctgtcccagggttttgggggtaaaccagcggggaggaggctgggcctggagcgggtcatgcactgggcgtggtgaatacaccctgcctgggacccccgtgtgcctggcagggcaggtgctgttgaccctgggcagtaggtattgggccaggggctcctgcccctggaccctgacgccgggctagacaggagcccccacatccgacgcggtgcagactcccatccctgcggccagcacagtcagtggccagggtggcccaggtccctgctatgcctcatgggtgtctgaggacaaccctgggctctgaggctgtccctaggggcacagcctgtggccttgattggaatggccaccaagcgtggctggcagatggctcagcgactttgcaggtggctggctgagtcccggctgtttagaagcctggtgactgacaggcgcttgtgttttggtgaggaaccccggggggtagggggtggatgctcgccactggggctgtggggagaactgggagtgtggggctccgtactgggcgagtcggctgctgcagggcgcagaccccactggccccttctggcctggactctcctccccgttgggcccaagatcccctggttgggattgttccaggaactcaggtcaggggccccgtcagcccttcccgggctcccccaggagcagcctccagactctgccctgcggatgacccccctcaccaaactgcttttcctgcctgtccgggggtgttggtgcgctttatccacagtgacacacgcctgccacaccgtaacgtgcccagctccagacgggctcatggtcagcccaggctgcagcagtcctgaatcctgttcttatttttcttttcttttttttttctttttccttttttttttttttttttttttgagacacagtctcgctctcttgcccaggcaggagtgcaggggcacaattacggctcacagcagtcatgaccttccatctcagcctcccgagtagctgggactgcaggtgtgagccactgcacctggcctcttttcatcttctaaagtatttttctttttaaaattaaaaagtgatttttttttcttatgagtacctcatgctttatattttcatcttttcattttcattttattttattttatttatttttttgagacagtctcgcgctgtcacccaggctggagtacaatggcacgatctcggctcactgcaaccttcccctcccagttcaagtaatttttctgcctcagcctcccgagtagctgggattgattacaggtgtctgccacctgtaatttctgtgttctttgtagagaaggggttttgccatgttggtcaggctggtctcgcactcctgacctcaggtgatccacttgcatcggcctcccaaagtgctgggattacaggtgtgagcctctgtgcccagcctatttttatttttatttttattttttgagacagagtctcactctgttgcccaggctggagtgcggtggcatgatctcagctcactgcaacctccacctcccgggttcaagtgattctgctgcctcagcctcctgagtagctaagaggcgcctgccaccatgcccggctaatttttgtatttttagtagagatggggttttaccatgtttgtcaggctgatctcaaattcctgacctcaggtgatctgcctgctttggcctcccaaattgttaggattacaggcgtgagccaccgcgcccggcctgttttcatctttttaaaataactttttttttttcgagacagggtctgtctatgttgcctagcctggagtgtggtggtgcgatctctgctcactgcaacctccacctcctgggttcaagcgattttcgtgtctcagcctcctgaatagctgggattacaggtgcccgtttagtagagatggagttttcatcatgttgacaggctgctcttgaactcctgaccttaggtggtctgccggccttggcctccgaaagagctggcattacaggcgtgagccaccgtgcccagcctaaaataacttttcttggctgggtacagtggctcgcacctataatcacagcacttcgggagaccgagctgggaggatctcttgagcctaggggttttagaccagcctgggcaacataacgagaccccatctctacaaaggaaatttaaaaattagtagggcgtgatggtgtgtgcctgtagccccagctacttgggaggctgagacgggaggattgcctgagcctgagagatcaagactgcagtgagctgagattgcactgctgcactccagcctgggcaacagagcgagacgctgtctcaaaacagaaacatctctgctttgggccttccttgttggcctctccccagccatgtggccactcgctggcaggcccgggccatgagcatcggtgcggatgctgtgctcagcctgggggcggcgccgtctcctctgggtgggattcgaggcctgatgcctctgcctggtgcaggagggatgttgtgctgagggtgttccccgtgctttggatgtaaaatttgggcatggagtttgtggtgtcttcagaggcagtcccgcctgcgtcctttgtgcatgcctgtccacgccggtcgcagcggtctccccacagagcccgcgcccacgccctggcacagcctctcctgctgtgcacgtcccaggcctttgatggcgtccacgtgctccgccgcctgcctccgagggtggccggggcgctgagtaactcgggaggtttggcccgtgtctggcgtagtgattcattgaagctcagagcctccaggggaaactccacactccctctcaccggagccctggcggggcaggccgggccgagacggtgggagggagggaggccgggagggaaaaacacaaaccctcagagacgctggaaactctgaggttggggccacctccgaatgggttcacatttttcctctgtgtgtcatcacatcctggaaaattactgtcaagaaaaggagacctctgggcagtgtcccggcctgtgtgcatgcccctggcgccctcaccctgcagcccccagcctccctcccctcggtttcccagctcagcggcccagggatgccccagcactgtctgctgtgaggccgcgcgcccgcagggctgcccccggcatcccggacagcgtccctgtccttagtcctgcccgtcctttctggcctttctccggcccccttccagtttcggggcatctggataaatggttagcatcattgtggtccggtccttggcggccctcctggaggccgggacctgggggtccaccgggggcctgggtttgcaggagacaggaaggggctaaaggggcagaagcatgcaggggcttcacctgcaggaggagtcgggtctttcacagctgcccggccaccctcggagcctgagaggccatcacacctttccctcatggtgccagctggaccctccacgctccttgcctccttgtgtgtcatgtggcagccacaggcacccccaccctgtggcgcattttgagcttctggggagctcagcacacacagcccctgtgaaagtgcagtgccggctgctggaccctgctgtgcccccggcatcacccctgtcctctgagacctctgactctgcccagcaagaggggcagggtcgggaagaagggagtgtggggcctttggaagccgggcccaggcagtgaggcggaaaccaggctgggctcagcatggcgagctcctcctggtgaaggcactggtgtccgggggcatcagcggcacagagaaggttctgggctccatctcctgaacctgtctggaagagcccagctgctcccatggacctgcgacctgctgcccggggccgggggtctgggcctctttgcatcggctcaggggaggccatccgtggctgggcgagggtcagctgccatttggatgccccggcagccgtggggctctcgcctctgccagagcaggcagcttccgaggtggcaagggctttggggagcagcgggaggcctgggggtgccgagtgttccggaaatattgctggttcttctggggcagtcctggcccgctgggcagagcagaacacggcctctgctcagtggcagggtggggcgccggggtggcggaaacatgaggccgcgtgaagtgggcatcagttgggccctggggtttggtctcggaggcctgcggggcagtggtcccccggctcttgctgccctgcggttcagttcctcctgctgcagcgcctgtgtgccccgtgggtcggcaggtctcgtgagaggcctcatctgagacaggaagccccacgcaggcttctggaaggctcctcctggctctcagccaccccgttggctgagtgagactgaccccagcagcttcctgaggcgtggcaaggcccccagggacacctggcggccacacacctgggggaccccaccaaggctgagacccaggttggggccccctgcactgctgaggtttgggcctcattccccgctggccctccgtctgcttgggagctttccaggtggggatgtttgtagggacagtggtatggcatccagttgcctcctccctgaaaccttcaacccgaacctcactcagcacagagaattgggggccagaccacggcggacggaggcgtcctgctgacacagcccctgtcgggatgtgggaaggggcggaggcacagctccagccccagcgtgaccgtgtgtgtgggaaaaccgtccgggtacttggggacagcagggacatttccagtgtgggtgtgtgagagccacctcccccatgcggtgggccctggtgtgatgctggcagctgggacaagagtccttctctcagcagatgctgctgtgctcctggggcacagtctgtggttttcttttgtgtgcatgtccatgcttgggtgttgtgtgcatgtccttgcgtgtgcgtgtccttgcgtgtgcacgtgtgtgcttgggggcgtgtgtgtgtccttgcgggtacacatgcgtgcttggggtgtgtgtgcatgtccttgtgggtgcacgtgtgtgcacgggtgtgtgtgtgtgcgtccttgcatgtgcacaggtgtgtgtgtgtgtgtgtgtccttgcgggtgcatgtgcatgcttggggggcgtgtgcgtgtccttgcgggtgcacgtgcgtgtttgggggtgtgtgtgtgtccttgcgggtgcacgtgtgcttgggtgcatgcaggtgtgtgtgtatatgcatgtctgtgtgtgcacatatgtgcatgcatgtttgccccagagcggaaggaaagtgaatgcagccgaatgatcacatctgcatgaggggtgttcactgttgtgtctgcccatctttctgtgggctgaaatatttcaaaataagaaattgaggggaaagagaaaggagggtgcttgtctctctccttgcctcctgctcctcctccctgtgttggaggctccaggacgcctcacccccggttgacgtcatttttggcctgcacaggcagcccgtttcttttctcctggcaccggcgaggaggctggggaggggggacgggaattcccccaggggccaggccttgactgccctgcagggccctcgctgtcgcttttttccctcacagtgtctcatccctcaacctctgttttccatccaaaggcatctctgtgaatccacctggcgcgggagcggcgctgatgccacaaatgcgggccagactgctgggcagagctcaccagtcaacagggctgggtgtggctggggcagccctgagaccccaggccctgccgctgtggctcccccttcctggcccctcttctctgtgggacagaaagtctctcctggggaaggctcggagctgagctgatgggtgtttgaagtttctccacacacagggtcccctggcatctccctctgtcatttggtggccaagtgacatttcccagcagccctactgcagacgccatatgttctcggggtgactcaggtggcctgggcccttctggtagccgcttatccagcctgaccccaggctccagcgaggctgctccggatcggggctgctctgcccaggtgaagggcgggtgtgggaggtttccgtagaggccgctctcccctgctaccacggccccgtgtgggaccctgggtctgtctgacagacagaggcttcctgagccaggcccttgggatgacgggtaggaatctagggtggatccacaggaattagagattttttcagttttgttttccaaatgaagtcaacagccccctagcagcgtgatgctgatggtcctgtcccctatggcccccatcctggaggcaccctggtgtgggctgtgggcctgggggtccttggcactgtccagtatgcggacgtggcagcagcccacatttcccccagtgaccaccaggctgtgccctggacgtggccgcctgagcacggcatgtcctggggccccgtctggtggtcaggctcagtacgagcccatcaggggtactctgcccgcctgggaagacagtgtggcttctgggggctcctccagggaggctctggaccaggctgcagaggatgccaacctgccacaggctggcctggccgctcatggacatggcggctcctggcccagggtctctcccccgggaacccaggcgtgctcgcggccctctggaatgcaggcgctggggctgtggggggccgcctggcgcctggcatcttgttataaaaagctctggcgcaggctgctctcagtggctgcaggatggttgtggctttggaagggcagcccccaggggccttggtcagccacctgtgggccccactgccgagccgtggtcagccctcactggctgccctgccatgacgctgctgaggtcagtgcagctcccgccagactcccgtgacaagtcataacagagccacatgctgggtggctgcagggccctgtcgcccacagcagtcgaggtctcaggtgtgtccggagggcagccctggagacacctgggacaggcgtacctctggcaggcgcaccctggctgtcacccagtgtgggcatggtgggggtgctggaatgctgtgtagggcaggaggcagcagcccgtggctgggtgggagactgcagggtagacgggacgggaccaggagggttgttcgcagggactgccaagccatccccaggtgtcgagagtgtgaggtaggagtgggagcccagagccggctccaggccaccccaactcccgacagctctcggctgttctgtgtgaggggggacggggccgagtgtgggtcggcgcagtgctgaggtgtcccacgtaccccagcactgtgctgaatgcattgaaatcactgcccagggctccgcgagctgcacggcccggctttgtcaatttcattgctgttgatgccaattaggggtgacgctgtccctcccgcatcccagggtgggcagagggaggggccggcttgttccctgggggcaggcgtgcatggattcagcctggccatggagctgtggccaagagggcagcgggggcagctggactggggtttttgccgacgctctaatttggcggctgtcgccacccctcccccccatggagaccctgacgtggcctgagccagactccaggggccatgtgccctgctggggagcaggggctcagcatcaggtctggtgcactgactgggagaggggggtctccagccctggacaggctctgagtggggtggggtcccccagctgctgtgcccagccctgcccccaggacctggccttggccctgcgctggccggggccagggagggagtgggcccagctcccaagtctgtgtgaccacctcggctggggcactgacagcccggggtgcggagggcccagcccgtgacacccgccgtcagccgcgccctctgcctccagcccgtggaccgggagcccgtggaccgggagccggtggtgtgccaccccgacctggaggagcggctgcaggcctggccagcggagctgcctgatgagttctttgagctgacggtggacgacgtgagaagacgcttggcccagctcaagagtgagcggtgggtgccccctcagtgcctcccggcatcttcgcgccagggtttgccccatcgggtgcttgtgctgcccgctgtccccagtgccagcactggctcccggcccaggtccctgacaggctgcccttaacaggacctcagagggttggggcccagggaggggcgtccagaccttcctgccttgtgtggggagagcagcccactcccaccctggagggtgcaggtgaggagcccggggcctgttgccagggcccccattctgaccagaagccctgttccttcccctcctcaccacaggaagcgcctggaagaagcccccttggtgaccaaggccttcagggaggcgcagataaaggagaagctggagcgctacccaaaggtctgcagacaggatgtgggggcgactgaggcacagctctgagggggccccccgtgaggtctgtggacgggatggggcgactgaggcacagctctgagcgggccccctgtgaggtctgtggacaggacgtggtggcgactgaggcacagctctgagcgggccccctgtgaggtctgtggatgggacgtgggggcgactgaggtacagctctgagggggccccctgtgaggtctgtggatgggacgtgggggcgactgaggcacagctctgagcagggcccccccgtggtggcgcgcatgcccttagtggccagttgatcctcccctgctcatgatttagaatgaaacctttttttttttttgagacggagtctctctctgtcgcccaggctggagtcagtggtgccatctcagctcactgcaagctccgcctcccgggttcaagtggttctcctgcctcagcctcccaagtagctgggatttcaggtacccgctaccactagctcggctaatttttgttgttttttttttttttactagagatggagttttaccatgttggcccggctggtctcgaactcctgacctcaggtgatctgcccgcctcggcctcccaaagttctgggattacaggcttgagccaccacacctggctgaatgaaactttaaacagcacatttgagccgggcgtggtggctcacgcctgtaatcccagcactttgggaggccaaggtgggcggatcatgaggtcaggagatcgagaccatcctggctgacacggtgaaaccccatctctactaaaaatacaaaaaattagtcaggagaggtggcgcacgcctgtagtcccagctgctcgggaggctgaggcaggagaaaggcgtgaacccgggaggtggagcttacagtgagccgagatcatgccactgcactccagcctgggcgacagagtgagactccatctcaaaaaaaaaaaaaaaaaaaaaaaaccagcacatttgaacccaggtcagtgtggttttagaacgcaggccgctgtgcacacacacggcacttggctgtctccatgcccagcctgccacgggggagtcaaagcccaggccctgattgggggtggctgcttctgcctgcctcagccctggtgtccatggcccagcatgggccgagtggggaggccacgccctggtccctggtgcagctccggccgtccctccaacccttccacttgtctggcctaggtggctctgagggtcctgttccccgaccgctacgtcctacagggcttcttccgccccagcgagacaggtgggcagcgctgtggggtgtccggggatggggggcaggggcccatggggcctctcccggctccttccttccaggccacaggactgcagccacctggcctgcgggctccagggcactgggtgggtgcgggtgctgatgtccccttgggggtgcagaggcatcccagttcgcagagtgtcaggcaggctgggcgcttgctccaggtgcccggccccagctcagggagcccgtggtcctgagtgctcacgtcgcccacctactgggcatgggtggggcagaggggcacccagaggaaggcaccctaccccgggaggagggcagtggtgctgtgacattcaggggcttgtgacctgtacccagacggccgggcggcagcagcccaaggtcacaggggcctcccccagggaaagggaagcgcttaggctggggcgggggtggggctggggggcagcgggtggcagtgggagtgctctccagcagggcgggggtcccaagtgtggcccgcacggtggcccagccacgccgagcacctggagtgctgtgggaggaacagggctgaattcccacccctcggggaaaggcccaggagggtgggagcagtggcccaggtgctggggcagcccggggctggcgtggtggaagagctgtctgtatgttctttttctcctctgcagtgggggacttgcgagacttcgtgaggagccacctggggaaccccgagctgtcattttacctgtgtacgttttttctcctgagcccactcctgcctccagtgctcggggccttggtgctgtgggcacaccgcccgtcccagctggggctcgtggcagcttctccacaggagcagcatctgtggcctcccgcccaggtgcctcctgcagcccatggtgtctgtgtggagacctaggagggcccttctccccgagccaggcggtgggagccaggcttcctgccttctctctcagcgccctgctcccctctggagccctgctgcaccccagcctggtccccacccctggggctcaggccactcctgcccgagggctgtgggaagggtgggtggacagggagtggctggcctcccttggagggtgtctaggtggcaaagggttaggctgcccactgcaaggggagccgggctgcacgggtggtgtcccctgcaggtgggcctgccccccaccggcccttccgagccctcagctggagtttctgcagcaggagtgtgggcacagggcgtgctcgtgaggggctcttctgccccacttgaggcgtcacccccatctgcaggcctgtcttccttcgggcgcatggatgggcgaggtccacggtgcttcctaacacgtaggtgccttctctcctcagtcatcacccctccaaaaacagtcctggacgaccacacgcagaccctctttcaggtacctgagggcctccctggggtgctgcggggcggggccctccagggagggcaggacgagagcgtgaggcctcgggcaggaaggaggggcctggcaggcgctggggcaggataataaagcctttgagagccggtgggttccgagggggccgtgcgcctctgaagttgcttctgacacggctttccggcctcctctgcttcctgcctggccccgggtgggaaaggacctgctaggcggcctgcctgaactgaggccgcttggaggtctcggcccccctgggctgctgtgctggggccaaggcggcagcagtccctgcccaggggtctgggtgaggaagggcccggcaggcctcggagcagggctcagggagccccagagggaccaggccctcagctggaggcggccgccttgggcttcagctgccccttccccctgcccggcctctcccgctggccccccggtccctgctaggaacgccctggtgcccatagctgtccgctgcttctgtgggtccctgccacctccctgagggctcctgagggtggggccagggtgagggtgccgggttcccagccctgctgggccgccctccagagccagaagcaatgaatgtcctgtccttggcctgtgggagagctgcctggggccttccgaagccctctggcctaatggtttcctcttcaaagcctcttcagatattttaattagccacagaggcgggtttttttttaagtggccacaggcctctacagaggcctgggttggaggtgagaagcttgctcactgcctggggctgcagccgcttactgagctggggcaagaaggctggcagctgccaggggtgatcaggagcaggactgagcgggattccctgcagcggaggcaggggaggggtgagacagtcccctctcagcccccgagctgccgggcggactccgggcctccttcctccgtctccatcccctcccttgctggccagccagttgataaacattgaatttggaagatgccttgggatggaggaggaccagtgcccaggcctgcagcccaccctcccgctgggaggcccctgagagcactggggtgctgctgccctgtttctggggacgcttggcttccctaccagccaccgtctcctgccctccatcagctcggctctagcctcggggcctctcggggtggtgtccccggtgacgtgcctgcctgcctgcctgccgtcagagagctggcggggctgagggaaggaagcctgcctccctggcaggcaagcaggcggcgggcgcggaagcaccagctttcacgtctctggcagagccccactccggctgcctgctgcctgggggatgtccaggggccggcccccggcttccgagagggacagcgtgcgtgggtgtgggggctccggtagcccggcagccctctgtggccctggcccaggagagtgcaggttttctgggagggctgggaggaggcggccaggagtgaggacagggaattgtgagcagtgtgggggcaccactgtggggaacaaagccccccgcccctgcctgaaacctgcgtcctggccctgggcatcagggctggccctgccctggtgtcctcacacagtcacttctgtgtgcggtccgcgtcctcaggtcatgaggaaggtcaccctgggctaggcccacctttgatgtcacggtcacctcacttatctcttcaaaggctctgctgtttgggcttccttccattggctttggcagggcaagcctggctcctaacaccctccgtttgttggagctctcaggctgcctctggggaccgtctgccaggacacaggccacccttgctgcctggttccccactccccaagccactcacctggcagggcgtgactggcacttctggcctgagtgcctgctgggcgcccgcccctagccagttctgtcgtccttcctttccacccaggacagccccgtcctgcactgccgtgtcgcccactgccggggcctctctgggaccaacaggcccccttccttccacccaccaggccctaccccacctggaccctctgaaatgttcctcgttgacaaatggtcttgcagaaggcaggatggctcctgcagcccccactcccgctctgtgggtggatgccccgtctctccctgcccaggcaccgtggtgccttctctctcccgggcaccgtggtgccacctccctcccagacaccatgatgctgcctccctcccgggctctgtggtgccatctccctgccgaggcactgtggtgccgccttcctcccgggcacggtggtgccgcctccctcccaggcgctgtggtgccgcctccctcccgggcgtcttgagctgcaagggctcctctcttggcttcgttccccggagggtggtgctgttctcgttggagggggcggccaggcgctgggccacgtgtgcatgcagcccctacagagttgctgccccgtgggggttgacgtgggcctcctttcggaagctcttcctggcaacactgagtggggcaaggggttggcagcagagaggcggctggatttggggccccagtgtcctgggcggcagctagggaggggccggctccaggccctcaggctgtgtcagggcagggcgggcacccccacttctccctgtcagccgagggagccaggcaggggcagcctgagacatcctgggacagtgctggtggggagaggcccctcagcctgtgcctccctcaaaggcccttcccgggccctgctctggctggggggacggtgtgacccactttccctttccagccccagcttggtgaccgggtggctccattcaccctgggtccctcgctgaaacggtgcctgggaccagagcagagaacacgcttgccagtggtaggagatggaggcgacgtggactctgggaggcttcttttttggggtccatccagaggccgagcctctccaagcactggtcagcctccatgccacccagtctgccgaccctcctctccaccatcccctcgtccgagcagtggcgatccctcccgagtcaaggctgggcacaagcacgtggggacaggccgggtaggctgcctggctcagtgctccctgcacagaggcgcagacagggagcccaggtgccccaggcctggctgccaagcctacttccctctcctggtgttcccgagtcctgcccgcccctttctgtgcgtcccgtggggcagtgctggttgggggtcctggcctgtgggggctatgatgagaaccaggtgcctctctgcatcggtggcctctgagggagccctctcgcccggcagcaggtgggatgcagatggggctggccagggctcctgtgcccacagcagcctctgggcagtgtcccctgggcttctgtgagcagccgcagcctgggtgtgaatcttggaggcccggtggtggcggagcatgctctccatctgggagaggctgagaccatggcagctcctggcgctgtcctccccgtgcccccttcctggctccccagcttccggcgcctctccagggccactcgggcagcccctgcccaccccacaggcccttctctgctcacaaggctttgatcccaggcggcacaattgggttttcaaagcattcacggcccttgtttgtgtccctgggcccccggctggaggctgaggtttcggcgttcctgggcctggcctttgaagcttcctcttattaatcttttaacatcccccagccccactcccacccccagcctgtggccctgagcagcctggagccgggagggggaatctggagctgggagggggataccccagcctggcagctgcacccctccacggtggtcccggcgcatccgccaggacccgccacgcctggccccaccttcctcgggtgcagaggccagaggagggaggacggtgatgctgcatggcttgaggaccctcgaggccccagccttcagctggcttggggcttggggtggtcccatggagggcgctggtcccaggacgccctggccttgcttacaggggtagggctggtgtcagacaggaagctgggcgatgggctcatgggggccgggcaggcagagcctgtctgagggtggagctggggcctggccctgggggtgtagctgccttcacagcaggggggtgctctgcccacacccggcccctgagccccccgccctccctgcaggcgaacctcttcccggccgctctggtgcacttgggagccgaggagccggcaggtgagtgtcagtggttggggccagtgtcggagtccagccagcctgtccctggacctcagagccagctgcccgggagggcgttcggtctggggcctcctttgggtctgagagggagatctgcggcccccagtaaccacctccccgagagaggactgggacagccacctgctggccacccccctcccagagctgagtgctggtgggcagatgctgggtggatggtgagtggacccctcctcagaggctcagggtgagcttgggcctccctgcaggtgtctacctggagcctggcctgctggagcatgccatctccccatctgcggccgatgtgctggtggccaggtaagtgccggtgggtctgggggcacctcccgtggcggcactcaccactctgtgtcttcgcctccccacaggtacatgtccagggccgccgggtccccttccccattgccagcccctgaccctgcacctaagtctgagccagctgctgaggagggggcgctggtcccccctgagcccatcccagggacggcccagcccgtgaagaggagcctgggcaaggtgcccaagtggctgaagctgccgggtactgcggctgggtggaaggtggggtgctgtggccgggtggagggcgggggtccgggtgctgtggcagggtcagtgggctggggggctaggtgctgtggccggcagggccgagtgcttcagccgggctggtgggcgggtggccgggtggtgagagcccggggtgtgtggtcaccctgatgtgtctgcactacagccagcaagaggtgagagctgccagcctgaggtgcccactccgccagccacaggaccacctcctctgccagcaggaataaagacttgtgcatccctcaacgccttcctgtcatgcttcctccagaaaagggcccccgtcgtctgccctggctcagctggaccgcagtgtccaggcctgagagcctggtggaccatggtgtgggcccctgaggagcctggtggaccgtggtgtgcatcctgaacccgcgtgggtctcctcttcgtttttaacctaacagttatttacacttcctccaaggagaacagaagtgcttgaggaaagtcttttgggggaaatcacctgcaacccaggagccaagccctgggccaggagctgggggaggagctagtaggtcaccccacatccgtagggcagggcctggcctcaggcctcctgctgcccccgagcgggctatagtgctgggttctggccctggtccaccctgcagccagcctccccagcaagtctgatgacttctacaggctcccagggctttcaaactgacctactgaggtgggcagggcggggaaggggtggatcccagcagccctgcctgcccggggccactggggctacatcgaggatgaagaggctcgcctcaaagttgtcttcgggcaccagggcaggagagaggctgggtcgcctccgatggttcccaggggcagcttttgtgcttcccaccctggggcctgactccctaccctttcccctccctgcacggggctccaggatggcgctcagctgagagcccctggggtgcttccagtcctgggctctgacaagagagagaacgtgaggtgggctggaggggaagtggtccaaggccctgcccgcttcccaagcgttggcacaagtggggcttatgccagaggcccctgagagtcagagggcagccagacctgggtggggcatccagacaggtcccacagccctgcgtctccaagggtgggcagggggcgtggcccgagggggctgacctgcacctctctggcactgcttgggaaaagaggaggccttcatttcagcagggccttgggccagggtccctctcaccctgtgcatcctggtcctgcctgtgaccacaggaacattcgtggaagccactgcccactggtggcagcccccgtggctgccccaacccctggggtaggaataacatttcccaggcaggtggccacatgtacgtggtccgggctccacagcgcctgggggtggggccgaggcactcgcacacatgctgtttgttagtgcatcctcctggcgctttgctttcttaccaggagtggaagggcacacacgggaagtgcagctttgaagcagtttgactttggtgattaatggcaagaaagccaagctgggagagacagttttgatttattgatgttgctttgtgagaacaaatttatagcctggggaagcatcttccaaggggaatatcgcatggctggaaaggtcacacgccagctttgatgtcgggtggcaggaatgtgggcaggaggcagcgctgccagctgctgtttgtcaaacacacaggctacctgctggccaggcctttcccagcacctgcctgtaggaccccgggtggcatgcacactattgtcccagggaggagaggcagggactccccaggtgctgccccttcccacaccagtgtccccactggacactccaaggcccgcagtgcactgcagtcctgccccttctgcacaggctggagactcccagagatcttgtttgaatcaactccaaatccttcaggtccttccctgcctcttatcagaggccgctggaaacacaaggcctgcttctgtggaccaggggctcctctgggggtggcctcagccacggctgagatccctagaagtccaggagctgtggggaagagaagcacttagggccagccagccgggcacccccacttgcgccccgacccacgctcacgcaccagctgcggaagcaccttctccagctggtccacgtccacacggagcgcgtcttctgcctgggcctgccgcacgccgcggactgctgcttctgcggtgagaaacgcgagaggtgggggatgctggggggatcttaaacccgagcccagtgagggcctcagcctgggccggtgccccccccaacacccacgggcagcccccagaaccaggccacagcacctgacaaacaggctcaggagacccaagtttaggcccttgtgggaaacgggaaaacacgtcttggttttcccgctggaaaaacgcaaaattccggatgctgtgcccggagggagcgtgggccctgggctcacccacaacgaagaccttcagcaactccaccatgagctgcagcgcgtccccgctcactgcaaggcagggggaggttatgcgggaccctcacccaccgctctggctgggtgctccagacatacccccgccctcccgaggccttggccctgcagagttgcaggaaagggtccctgaggacagacacggggacccacctcccgcccgcacccccacccgcacctttggtcttgtcatccttgaagtgcaggtgcagcagcctgctcaccagctcctagaagggaggggggtgtcagcgccacgccccgccctcccccccgcaccccccagggtggtgaccattctggtgacagtggctgtgacttctggctggagacgccctctgtgcctgagcctctcccagggcaggggacaagggccagcctagtgcttcgggtggcagaagctgaagcagatgcgtgggcagctccactagggggcgccagggccctgcacagggtctgggctgggagcctccctacggcgtgagtggtcgcagacacgggagcaggccccgctgctggggctccagggagagagtggagaaaggcctcgtcgagtccggcctaatcttgcactcccatccccggcagagggccatggctctgctctccttgtggggaggcagggaaggcagagcccgggttgggtctggaggctggaggtggctgctctgcaggtgggctggcctgagggagtgccaccagtagggccttccttgtgccaactctgttctgggtgctgggtcagctccgcccgtcttgccctggtgctcatgatcctgcaggaggtgctggtgtcctgggagcgcagagcggggctgcgccagcgtggtccacaggctggagtgaggggtgggccagacgctgagggcccagggcatgatgagctctccgtgtctccatggcaggaaactgggagtcctctctaggtttttgtggaaagcagcactggcgttggaaaggaccactctggctgccatgcccggggtggggggaagggagggggctgcagagccagggcctttctgcctttctgatggatggaggacggggacaagggaggagtctacgccaagaccccaaaaggacggcactgctctgaggagatggggggccgtgggcaagtgcattttggagctaggacacaggagatcagtttgggatgcgttgtgtgtgaacacaggagtggtgggtggcagctgcagtggtggcggccgagactcaggagggcagccctgggtggctggtggagccatgagactcagtgaggtggcccaggccaggcaccggcccacagccgccgggaaaggagccagcacggagagtccaggactgggggtgggggcagtgggcacccaggagcccagaaacaggccactaaaagggcaggtgggtgaactaccagccaggccaccagcatcggccacagggaggtcacagcacctcacccagagcagtccagcaggtgacaagcagagcatggacgggtgaagccctaagatgcagatggtgaagaatgttccccagcagcgggcagcagggtccagcatcccggcttgtccagcatcccggctcgtcctgagcccttgctgttccctagccagggtcccagtcaccacccgcatgagcccagtgccacctgctggtccttccagctgcttactgccagcagtaccagaaaggcaccagaaaaggtagagaaggcactatctccccacctgctccgggacccccaacactgctgccccaggccttggaaggaagaccacgccagagagtggcggatgccaggtctgcctcgacaatccatggggcttccccgtacatcggcagtggcctcggaaggcaggcccagcactggggcggttgtggagggtgcctaggacacagccagctttgccccatgacgtgggcgccacgccagggctacgggccccccactccccgtcattctcacgctcattctctgcaatgaccacaactccagctctggccagagcccctgggcctctagttgtcaggtgggcttgatagaacacatgacctcctggggtgtgtacccagtgccccgtctccggcagtggccttttggctactttaacctggtgttctcacaaccacccagtgaggtggcccaagcctcagtgactttctctttctgaattccggcaagaatcttcaactccaccaccagagttccccacaccgacaccccccgccccccacgcctgctgccttgggtgataaagaagggcctgattcaggagaaacagaattctccctgcttctacagggctgaagtcctccctccaggatgggttcacaagggcctgagaccctcccttcccaggccacagaggcccacgaggccctgctgacatcgaggaagctcggtgccccaaccttcaggtagagcagtagaaaggttcagaaaccactctgcctgcaccgatggggtcctctgcacatggcacccccagagagctccacttccaggaacagggaagagcagggcacgccctccagcctgggcggatcctggctcagacggcctaggtctgaccctagccctgctgagtcacttaacgcccccgtgcctcagtttctccactggcaggtggggttaatccctgtcaagtgtgtgtaacgtggagcaccgaagaaaccacgcgttcctagcccagtgctggcgcccaccggggagcaaacaaaagggaaaccactgtgcctggcggctggggtaggtcctgccggctcctcgggctggacgatctcactgtccccgtcctggggcctcatctccccttaacaaaagaccccaggctcagggcgcagggcggcggcccagctcctcctctctcttcgccggcttggactccgccgtgacggcgcccacccctgcctgtttctgcagaccctctccaccttcccgcagccccggctgctccacgccccctcctaccagctgcgagacaccagcccacgagggcgcggggcgcgcggcccggccggagatggagtctgagaacgggcccaacctcaaaggcacagggggcggcgcgggggctggcgtctggccctcacagtgtcacgcgtgaggtcgggacggagcgtccgcgcctgcctagcccctgccctccggccctcaccttccggaagccggatccagctcctgctccctccatgaccgcagcctcaacgcgcgcccaccggaaccccgccccgcgcctccagccaatgagaccggagcgcgcccccggagccccgccccgcgcccctagccaatgagtccgaagcgcctgctctcggagccccgcccccacgtctcagccaatgagcccggagcgcgccctccagcagcccctccctcacgtcccgcagccaatgaacttggaacgcgccctcccggggcaccaccctcacgaccctcagccaatgagcccggagcatgccctcccggggccccaccctcatgcccctagccaatgaacctggagcgcgctgccccctctcagcttgcggcccgaaaggcgcgccagttcctttgttctcattggcccgcaccaagcgctgcctgcgcagagcctgctaggagttgtagttcccgcggcctctcccggcgcgccttgttcttcctggatactgaggccccgacgcggctgtcgcgagggcgggggtcggggctgcaggcggggcagggctgggtgggggcgcgcgacgcacctgcctgcttcctgcacgggtggtccccaagcactgcggggccccagcccaaagcggaccttgactaccgcccagccccgcgctcccaggacctcccgcccgcggagcccactcggattgctctccgcccgggtcggcggaggccccgtctcctgtacccggcgctgggactgctccgcaccgcgcggctccctttcagcagctgcgggagcatgcggaggaggccctgccggccccgcgggtcatggaggagttccggcgctcctacagccgcctgtgcagggagagtggggccgagccccaggaggctgtcctgcagcagctgcaccagcttcccaggggccggctggacctggccacgcaaagcctgacggtggagacctgcagggccctgggcaagctgctgccgagggagacgctgtgcacggagctggtcctgagtgactgcatgctcagcgaggaaggtgggcaggcgcggcggggtggatccctctgctccttagctgcccacaccattgcctcggcagcccgaggtcgcttcctctccaggctctccaatttctgtgccgtagttaaagcgagcaggggcgccccttcctgcacctgggagtagagggcagttcctctgtatgacgggggagaggccttaacattcgcggtcttacctggttccccgcgtgcagagccggcttggtgcctggcaggggctgcaggtgtttcaaacatgacttcgcagcgagactcttggccagcgccaacccagaccatcgggacagttgtcccttcctgggtctagggagctgccctgaaaaggggcccacggggagggccttggggtcagcaggggcagagagtgaccgccggccccccttacacaggggccacactgctgctccgaggcctgtgtgccaacaccgtgctgcgctttctggacttaaaggtgagatacctgcactcttgagtgtccgagtgtgccacccaagggcaagaggagaggtggaagatgccaggtctcgggggcctggggtctgggcaggtggctggaagctgtctgtgagtccccaggccgctctctgatggcctcctgtgtgtgaccatctccagagcaagagttcacattggcaaacaagccggcccttggaagccccctgaagacagggagcccaggagctgaggaaggctgcagggtgcaccccaggcttgtcccctggctgaccaaggcccttggggcatgggcgggaattcagagccagtcagggcacgcgagtgactaccggcctgtttctctcctagggcaacaaccttcgggctgcaggggccgaggctctgggaaaactcctccaacagaacaagtccattcagaggtgggtggtggtcccgaccccaggccctgtctctgtgtggttgaggattggccccgagcacatgcttctgcagcccaagagttccccattgccaggtgcccatgtttcacatacgttggcaggggtaggcagaggctccggcccatcagaccccaagcccacacccgtccccaagccctggaccccacgggctaggcagtcccctaggtgaacactggcttctgcccctcctgcagcctcacgctggagtggaacagcctgggcacgtgggacgatgccttcgccaccttctgcgggggcctggcggccaacggcgccctgcagcggctggacctccgcaacaaccagatcagtcacaagggcgcggaggagctggccctagccctgaagggcaacaccaccctccagcagctgggtgaggcctcccaggcgccctcaggctccctcatccctctgaggctgcctctgctctgggaagtgaggggctaggggactggcctgtgctcctgctctgttgatgactgcaaggcagtgccccctagggaagcaccccggccaggccagctccccctctgccaggtgcattctgtctggtgactacaggtttccttccagacctgcgctggaataacgttggcctcctggggggccgggccctcatgaactgtctccccagcaacagaaccctgtggagactggacctggctgggaacaacatccctggagacgtcctcagagccgtgggtacggtgcagggctgtgtggagtgacgcgtgagcctttgacagaggcctgtccaccgagggcggggtgccgggctcaggacgggaactgatgaggagagcagcctgagagcccaggggaagcaggaaggagcggaggggtcgtggggcacctgtttggcacttgaatggcgttcgccacacatgggcactgtccgaggcgccctgtgtacttgctgagttcttaggacctgtgcagtggagggtgcccgtttcacagctggggaagctgaggccgtgtggctcacagtcctggccttggtggctttgctgatgcttcgggtggcccaggtcttggccttggccaggaaggctccctggtcaccctgagtctgtggccctgcatgtgagtcaggtgaggtggggccccctggcttgtgctggcctccacacattccctcccaccagcgaccccgaatccttgcagctgatgtctcagcctcaggccccagtgccccagactcagctggggactttgccaggccccccgtactccctaatccgcgcacagcggcagcctcttccagcccctgtgctgagggctcatccctcctgctggttctgcctggcctctgactccagctgcgccgtccctggcttcgcctcggcactgccctggttgttgtcatccctcctgacctctgccccctcgccacatgctacccagatctttccagaactgagctgggcacagcatttgcctcagcattgtgcagtgccccttgacctttgggatggtggccagatgccccaggatggcccttgccttttgcggtggagcagctcccaccacctctgccccacatgtgcacgcgctccccaacaccaggcggctcttgctcacagcccgaaccccacaaagcacttccacccccatgcactgagggggcacccctgacttgccgggtgagacgctgccccacacggcatagattcccaagcagccagccgctgggtgcagggctggtggccaccagctactcctgaggctaagcagccccggggtgacacagctcctttgtgtgtgtgtgtgtgtgtgtgtgtgtgtgtgtgtgactgagtttcactcagtcacccaggctggagtgcagtggcgcaatctcggctcactgcaacctccacctcccggttcaagcgattttcctgcctcagcctcccgagtacctgggattacaggtgtgcgctaccatgcccagctacttttttgtatttttagtacagatggggtttcaccatgttggccaggctggtctcgaacccctgacctcaggtgatccacccacctcgacctcccaaagtgctgggattccaggcatgagcccctgtgcccagctgacacagctccttctgcagagcaagccatgggccacagccaggaccggctcaccaccttccaggagaaccaagcccgcactcacgtcctcagcaaggaggtccagcacctccgggaggagaagtccaagcaggtgaggatggcgccttcactgaccttggagctgcttatggctggagggcctggccacgtccttcctccctcagccccgtggtctgcccatcttcccttcctcggggccctggagcctctctgagtggctggtaccaggaaggaggggcggcctcctggtctgatctgcaggtggacttccttggggagctggcgtctgagccctgaggcctcgctctgcaggggccacccttcctgtgaaggagacagggcaccgtgggtggaaccctccgctgccttgccacattggtgggcgctggctctccttccccctgagaaggtcaggtggacaggctgcaggtgccctgacagggctgcggctgtctctgtccccagttcctcgacttgatggagactattgataagcagcgagaagagatggccaagagcagcaggtgagcgggcccagggcaggggcagggtgaggcttcagggatcaggtcctggctcagactcagatgggaccaacctgagcccacgagtgaggccacgaggaggtcgctggaggctcagtgcccaggcgaccatagatgcttaaggaacagcagcagctaccgaggccagaggggtatgggagcgctctggggtttgggttactctctgcaccctcctctctgcccacagggcgtcggcagcccgtgtagggcagcttcaggaagccctgaatgagaggcactccatcatcaacgctctcaaggccaagtaagtggggggtggcctcaggatacttcagagacgtgcccacagggcagagaaaggtggtgtgaacctgtgtgcaagtcctgtttgcaaagcagaggtgggaaatggtgaggctggggcagtaacccagaagccttcctggaggaggcgggtgctggctggggttgactaggtgcccagcaacagtgaaagcagcgaggcctttataaggcaagtgaaactccaaccggggcgggggtgctgcccctcctttctgcaggctgcagatgacagaggccgccctggctctgtcggagcagaaggcccaggacctgggggagctcctggccacagcggagcaggagcagctgagcctgtcacagaggcaggccaaggagctcaagctggagcagcaggtgggtgggcagggcttgagaggggtgggccaaggggtgcgtggcggcttcgtgaccctcactacccataccccgttcccctcccaggaagctgcagagcgggagtctaaactcctcagagacttgtctgctgccaatgaaaagaacctgcttctgcaaaaccaggtagctgtggtggatggagccagggagcccagggtgggcgcggcagggctgggctgcagcttccctccctggtgccggctttcaggtagacgagttggagcggaagttcaggtgtcagcaggagcagctgttccagaccaggcaggagatgaccagcatgtcagctgagctgaagatgcgggccatccaggccgagggtgggcacgggcaggcctgctgtggaggggcctggggatgggcaccgggggacgggggcccccaggggatgctcacgcatactctgcccaccctgggcttccagagcgcctggacatggagaagagaagatgcagacagagcctggaggactccgaaagcctgcgcatcaaggaggtgccctcttcgttggcctctaatgcgcctcagtctctggtcttggtgtcacgcaggtgtccccaaagcacacacctggtgggagcttcccttgccaaccttgggtcactgggtggccgtattttgccagcctgagcggatgtcagacccagaacctcctattgggggcggcggggggaccccggcaatgtctgagccgtagtacaggctgccgttgaagagacaccaaggcccactcgttcagggtgtgcatgctgcggtagtttcctgctaggccatctgaggcagtgctttctcagaatgaacaaggttctcaagagacacctgcctttcagggtggggagtccgtgaggagaaggtagggaggcccgctctccactctggccccacaatccctgcccctgagcaggtggagcatatgacccgtcacctggaggagagtgagaaggccatgcaggagcgggtgcagaggctggaggcggcgcggctgtccctggaggaggtgagtgcccaccaggcagggccaagctctgccttagtcctgggctgaacaaggcaggggcccctggtgttcgccgcctcaggaccagagacctcttcctgttcccagaggctcataggccccaccttggggacccacccaccagtgtgcccaagaagctaaagggacttaggtggcattcggacttccttggccttaggaaccttgcccagcgagctaggtggcagagcagctgcgtggccctcaggaggctggcagagaggagcccccctggctggggttggctggatgggccagagagagaagggccctgggccagggacaggagaacgggctggcaggtggccatctgtgcaggagctgagccgagtgaaagcagcggcactcagcgagcgtggccaggctgaggaggagctgatcaaggccaagagccaggcccgcctggaggaggtgagccacacatgtccgccaccctccgggggagccaggctgcccggcattgcggcccgcatgcagactccagagcttcggtctgagtggggaggcgggagtgtggtgttgaggtcagatgagcacaccctggacactggtgggtccgcttcagccttggatcagggcctgagacggtggagaggtttggcccatctctgcagcctgtgactacacgcatggatggatgggaggggtggtgtgaccgaagagggaggaggagagcccagagggcatctggaggaggtggctgccaggggagcgggttcagagtcatagtaactagagcagccagtcctgcagagaggtggggtcgtgcccgtgcagacattccctcagctgagctcaggctgagcccctcatgcttcgtggcggcccctgtgctcacagcaacagcgcctggctcacctggaggacaagctgagactgctggcgcaggcacgggacgaggcgcagggcgcttgcctacagcagaagcaggtggtggccgaggcccagacccgggtcagccagctgggcctgcaagttgagggcctgcggcggcgcctggaagagctgcagcaggtaggcggggctccggtggggggccccgggcgtgctagcccccaaccctcgcctcactccccagccttcgtgcctggcaggagctgagcctcaaggaccaggaaagggtggccgaggtgagcagggtgcgcgtggagctgcaggagcagaacggccggctgcaggcggagctggcggctcaggaggcgctgagggagaaggcggcggccctggagcgccagctgaaaggtgagccagacccttgtcctcccgccgcccactggtgggacgtgaggccagccagagagcggggctggccaggtctcccgtgctgaggccgtgccacggtgcgctggggctgcgtccgctcactgcgctccttgccctgcagtgatggcgagcgaccaccgagaggcgctgctggacagggagagcgagaacgcgtctctccgggagaagctgcggctccgggaggcggagatcgcccgcatccgggacgaggaggcccagagggcgagcttcctgcagaacgccgtcctggcttacgtgcaggcgtcccccgtgaggaccctgagccccccaaagtgagacaggccgggaggacccgggcgcagtaggagtgcatcaggcggcgcccgagatggaccaggggctgcgtcccgcccgcgccgcctctttgagacccgggtcgtctgttccacgcggcggttgcggcgactgttggtggtgtcgcggctgcgggggaaccccgtgggaggcgcctgggaagggctccctaccggccccttcttcccggtcgacgccacgtgggagcacaccgggaaggggtcccgcgggcgcgtctccccctcgccttttgcgatgtcaccgtgaacgctgcggccgcctgcgcgcggcggggtttggaaatacagcgcgtttgcactttgtgatacattctggccccgcctctccctccaaacgcgcgaccgtccgtgcctctccaaacgcgcggccctctgcccccagccctgcagggagggcctgccggggtgcggctgttcgcccctcctcgccgctgccttgaagggacgggagggccgcgggggctgtccgtctgggggttcgggcggctgcagaccccggagttcccagctggctcccggcggcagggggcgggtccccgagaaagcgcagcgcgcggagccctccccgccgggtccaggtcgctgggctctctccggcctgcgctgcgccccgagggacccgtaggagacccccgggccggggtcgcgctggaggcgggggcgccgcagctcgcgcagctctgcccgggttcgggcggccccgccccgccagccgcgcggccgggcgccccccgcccgcccccgcccccgccccccgccccccgccggccgcgctcggctgtctccgcgcccggcgctcggcggcgctcggctgtctccggccgatcgctcggcgctcgggtccgcggccgctgcggcgccgggcatttctccgcagctcggctcgcggccgcgcccgccgccgcccggcccgcgcccatgcaggccatcaagtgcgtggtggtcggcgacgggtgagtgcgcggcccggaggccgcttggctgggctgggcgggaggggggctcgggggctcggggcgcagccggggcggggcgggggtggcgcccgggtcctcgcgaggcggccccgccgtaccccgcccgagccgcgtgcgccccggggtcgaggagggcggggtggggcggggcggggtccgcgggcctccagctcgggcccacctgatgctgcccggctcccgcttgggctggctgcgggcgaggcggggccgccgccctgtcctcccagtgggtggggccaggcctctcacctgggctgaaccctcagccggccccaccctctcctgccgccaccctcggagtcggggcctctgcctggggccccagtgtggggcgccctgcgcccttattcaccaccccagcccccggagcccggcctgcccaggtcgtcctccagccttaggtcgccacggatctggtgggctgggtccccctctcgaccccagacgcccctaactcgcctctggctccgggagagggggctgcccttgctgggcagagggtccgaggccgggcccgggagccacgtggcttgccctgtccgcagcgccgtggggaagacatgcttgctgatcagctacacgaccaacgccttccccggagagtacatccccaccgtgtgagtgtgggggcttcccgggagagcacaggccctccgtgtgagtgtggcatgggggggacacgggcagggtctcctctgggcttccacgtcggctcaggtggccctgtctctgggcttcccggctggagctgaggtgctggccagagttctagttctgtgcagacttgtgaaccccaagacacaggccagcagggctgggggtttctgggacccctcccaagccctgaccctgccctcactgctctgcagttttgacaactactctgccaacgtgatggtggacgggaaaccagtcaacttggggctgtgggacacagcgggtcaggaggactacgatcggctgcggccactctcctacccccaaactgtacgtaacaatggggccagccccgggagctgggggggtccctgagatccgcacaagggagggagcagggccctggggagcccctgaccactccaccaggtcccacctttttcccaaggacgtctttctgatctgcttctctctggtgagcccggcctccttcgagaatgttcgtgccaaggtagggcaaggctgggggcccctgtggggagagggcttgccccagtacctgccccgacaagttgtcctttagaggcaattgcgatacgggttctgcctggggtaggcacacggagtggggtctgaagatgaccatgggggctgatggggtgccgtggtggtggtcacagctctcagaatggagggttctgagggctctggctgctggggatgggccttgactaggaggccctgggaggtctccaggttccctggctgcgtgtttgttcctggtatctccccaccaaatccgcccctggtcaccccttgaaggaagaagagccaagtgtagctctggaacagtggggaaagtccctgagggccgtgacttgctcaggtggggctggggtagccgactccgggcctagggatcagagcgtctgtccctgcagtggtacccggaggtgcggcaccactgcccccacacgcccatcctcctggtgggcaccaagctggacctccgcgacgacaaggacaccattgagcggctgcgggacaagaagctggcacccatcacctacccacagggcctggccatggcccgggagattggtgggtaggcgctggcggcctgcaggggaggggtggggaggcgcagtaagggcctccctgtaccccaccctcactgtctcccctcctcactgccgctaggctctgtgaaatacctggagtgctcagccctgacccagcggggcctgaagacagtgtttgacgaggcgatccgcgcggtgctctgcccgcccccagtgaagaagccggggaagaagtgcaccgtcttctagagccctggcccacccgagcctgagggctggcggggagcagccctggacgtgtccgctgttgtgttgagacgtgtggtgtccctgagtcggctgtggggagcggtgggggtgggccggggggaagcatggggatgaggctgggtggcaggatcctgtcctctctgccgcctcattctggggtgtggctccagccttccctggcccccgccggaggccgggagggagcagggtctccctcagggctgcaggggcaggtgcagggaagccccaggatgggcttccctggagggggagggtgggggggagttctgttccttgtgccccgaggtggggcagccccttctcattttatacaataaacattctccacctacacctcttgcctctcactacctgcccttctgtcctggggcggtttgctcctaattcccctctgtgatggtgcagagcgggtccatcacaccccagccgaccccagccgcacttcagagctgagttcccaaaggcagcactaagcttcctccaccctaccccaggggaagagggggcctgctgagctgctcagccccccaaaggagccgacccagatcaaagcaatagctagtgcattgagccctagggatgattacttggctgtgtacaaggcctccctcaggctgatttgtgcctctgggagggcacatgtcagggaggggtggggagaggcgggccagttctcaggcagcgcctgttgtgctgaccgggaaggtctgaaaagaggctgaagcaggtcaggcctctctgagcctcgtgggagccgaggcaggctccccgcatccctcaactcctctggctggcaccgggagtaagggcaatccaggcagaggggcagggtggaggagggcgcgggggtcggggtgtggtgtggagagtgaagagagcagtgacccagcacagtccgctgacgctgaagccagaatcagtgggcccggagccatggtcccgggattggagtcactcgggattggagggtgccatgaggtcccgggattggagtcactcgggattggagggtgccatgaggtcccgggattggagtcactcgggattggaaggtgccatgaggttccaggattggagtcactcggggttggagggagccatggtcccgggattagagtcactcgggattggggggtgccatgagggccactgtctgcttccgccttgtgctgtgtgggggcagctcctactggctcaggaaagccaactgctgaattctcaacaattttgctagccagttgttaatgatcattaacaaattatagaagcttacaatttgtgttattaaaagcaaaatcggcaaacgtcacttcctacttatttctgcatacacgactgttttctctgcccctcggttatgtacatctgtgggacctatggacacaaacaccacataacagggtgctgagggcatctcctccagctccacgttaaatgacatctaactggtagcttgaaatcagccgtggtgggaggaggcttgacttatggttacttgtctagacttcagatgataaaatgcagattagacttcagggtgctgtgtctatgctcattacattgtgaatagcacaagttgaggaaacgctcttctagtttccgaaaaccatcatctgattcaacaaagtggctcagatcaccgacgaagtggagaagcttgacgttctccttgtttcccttttgtcttactcattagcttgaaggaagaggagccaactgtacactcacagagggggccatcaacactcacatgcacacaccgtctcaccccagaggttctggacaggcccgaaggccaaccttgctgaaattcaccaccctctttgggaggtgacctttcaccacctcccacctccctgacagagaactggccaggcctgaaaacctcaggagtgggagccacgctcccccttggattggaatgtgaatgtcatgggtctctgcccgcgttccacacctggccccaagcccccagctacctgctggcagcctaggaatagcacatagtctgggcagcagaatcaggtttattggagggattgggggtaggatgagcacggcatggggcttgaggtgtgtggagggagctcagcaggcccagaagcccccttccaccggcaaagtggaacccgtggtcatgccacttcggtcactcagcagaaagaggatggcgttcaccacgtgctctacctctgtgggcagggcgggggtcaggggcatagaggaaggaggctgccgcccatctttccctcccacccctacccagggcacacacagggactgctggcaccacgctggctgggctcccacctgactcaccagcaaacttgccaagtgggattcggttcagcatagtcttggccttgtgggggtcactccaggtggcctggcccatggacgtcatcaccactgtggggtttactgcattcactcggatctacaccgggacagctggggtcagcagggcaagtggggtgtcctaggttgggggaggtaccccagccctgctcaccttgtggggcccgagctctagggccatcaccttggtcagcatgtccagggcacccttggtggagcctacgaagaggaacccaagctggctggggctggggtcggtgatgagggcgaggctggggctggggtggggctgagggcacagctggggcactcacagtagacgctatggttagttactgcccgctgggagcactggctggagacattcacgatggcccctgggactccccgggctattaagcccctggccacaatctggaatcgcagcgagaccgtgaggcagagctggcatcactcacgagaattcccgtccagcccacagggcagctcacctgcgacacctggatgaccgcacgcaggttcacctcaaaggatctagaggccgagggacagaccctggtcagagattagggctgctgcgtcctccaggacagcccctccctgaggttcctccgccctcacaggctcacctgtcaaaggcctccttggtgacctccaggaagggctgcagcagggcgacagcggcgttgttcaccagcaggtccacggggcccacgctgcccagcgcccgctcggtggcctcccagtcacccaggtccacgcacacgggttctatccccgggcactgtgtgtatcagggggcagttaccagaggctctgtgcccagcaagcggcacagctggggactggggctggtgacctttcagccggacaagtaaaggagttaggagttccgaaggtgtcgggactgtggggccagcagccgggcgctacctccggccggttcacttcctccctgcgcccgagcgactcctgcccggggcctgcttcgcagccatttcggcctctttctgagcccgggggccccggcggctctgccgaccacccggccgcccacgcaggccaccagccccgagagagggtgcgcgggcgcccaggccgcggtgagaagcgcagcgcccgcgaggggaggcggagtcgcgcacagaggtaccgcccccgctcgctgccgccccctcctggctcgccgcctcgcagcgctgggacccggcgggacctacctcgcggacaaggctgtcaagatccgcctgagtccggctcacagccaccacccgcgcgcccgtcgcgtgcagcgcctggaccgtgccgcgccctatacctgccgggagcgggctcagtgaaggcgtcccctgcccgcctctgcccgccgccggcctttgcccacctttccccgccgcccacctttgcctgccccggtgaccagcacccggcggcccgcgaggaacagctccatgtcggcgcagtctccgccctccgcactggggctgcggaacttgaagctctggccacgatgggcggggcgcggcggggccaatggcagggcggccttcagataggcggtggggacattcaaatagctgctccccgctgcagtgattggccgaaaggagtgggcgcgccggggcggggcggggtctccgctgcctcagggacgggtcttttgaagtgcctggtgtgacccatcttccgtgcttgaaatcgacgtagtggaccctggctagcatatttttccctgccaagattattgcaaaaagacgatgtggtggttaatatcggaaagaatgtgtggttaatatcaggaagaacacgtgaaatggagaatttcagggctaacatttcttgttttgtttctgaaaacatcggcatgtcctaaaaagtgtcgcctgtgcccatcatctctcaggcttgggagcaggacaccgccggctcactttaaagccaagggaaagaatttggacaaccaactacgtctggagaagacaccaatgtcagcagagctccgctttcatctgtgggcgaaggattacctagatgccaaggcaagagactgaagacacaaactgtttcagtataacaaagaaaataggccgggagcggtggctcacgcctgtaatcccagcactttgggaggccgaggcgggtggatcacgaggtcaggagatcgagaccatcctggctaacacggtgaaaccccatctctactaaaaatacaaaaaattagccgggcgcggtggcgggcacctgtagtcccagctactcaggaggctgaggcaggagaatggcgcgaacccaggaggcggagcttgcagtgagccgagattgcgccactgcactccagcctgggcgacagagcaagactccatctttaaaaaaaaaacagttaaaataaaaatagtcataatacaaattagatataaaaatgatcatgatcatggataattatcaatcattagtataaacattattaatcattagcttttaatattactctttgttgcattactaatataacctagggacattgtgagaagtgacctagaaggcaagaggtgagccctctgtcactcccgcataagggctgcttgagggctccttggtcaagcagtaatgccgttgtctgggaagccacccgttacttagaagactgcgaaggggagtctcctttccttggaggcgtcagggaacactctgctccaccagcttcttgtgggaggctggatgttatccaggcctgcccgcagtcatccggaggcctaaccccctccctgtggtgctatgatttaatggtcacatttcttgtccacttccatgttcctcccgtactcctggttcctctttgaagttcgtagtagatagcagtagaagaaatagtgaaagtcttaaagtctttgatctttcttataagtacatagaagaaagcgctgatgtatggtcttctctttctgtttcagctacctaaaagggaagcgccccctgtcctatgatcacgtgacttgcttcaccttgtcaatcacttggaagattcaccctccttaccctgccctccttgtcttgtatgcaataaatatcagtgcgcccagccattcggggccactactggtctccgtgtcttgatggtagtggtcccccgggcccagctgttctctctttatctctttgtcttgtgtctttatttctcacaatctcgtgtctccgcacacggggagaagacctgctaagccccatagggctgtaccctacattcatctgaaagggacttgaaccccaggtcaccttggacagccagcatccggccaggggcaccttttagaagttgaataggataggaagggattggggtcatggaagtacatggtggtccagcaaagaccagcattgcttcccgaggctttggggtcagttacagatgcgtgtgtgtgtgcacccacacactgggcctccatgtaaaagctactttgttctgtgggtcatggtaggaaagtctagaactactgcccttctgtggccaggagtgaccttctgtggccaggagtatggaattggtgactgtagggcctttggatcatctggggctttgggcccacagaggtggacaggccggaggcaagggtggccaggcacagcaggaggcaaggtcctggtttgttctggaggacagccaagtgcatggtccatatcagacctggcactgcggccagtccaacccccccttggccgccctgtaaactctgctttctgcccctacccttggagcctgctttctgcctgccagcagccaagggaaggacacccctcaacctgtccttcctggaaggcccatctgcttagacccctccagcggcctgcacgtgcccccaggagagtggaccaggcctcactggtcctgttatccgtggctcaagccctgctccctgtgagtcctgctggctggtcagaagcaccctcggcatcccctacccccaccctgtgccctgtgccctcccaaccactgcctggagggcccgatcctggcccctagccctctgccctcttgcccagctttggaagattcccaaggtctgggtaaagttaccagtatccagattccttctcgagctcgaaccaacattacacttttcctagagtcaaaacgggagttaacacaagtatataaatgacaattaatacattggatagtttgattgttcgtccaaattttgatattccccactaacagcatataacgaagcttaacacaactctataggaatagtcacattggaggtgaacaaagcagaatgtctgaatctacactgatactgagggagaggagcagtggtggccacacccgatgttatccgctgtcaaaaagcaatttgaagggccgggcgcggtagctcacccctgtaatcccagcactttgggaggctgaggcgggtggatcacgaggtcaggagatcgagaccatcctgactaacacggtgaaaccccgtctctactaaaggtacaaaaaattagccgggcgtggtggcgggcgcctgtagtcccagctactcgggaggctggggcaggagaatggcgtgaacccgggaggcggagcttgcagtgagccgagatcgcaccactgcactccagcctgggcgacagagcgagactccgtctcaaaaaaaaaaaaaaaaaaaaaagcaatttgaggtgcccggggatgctgaagaggtagagtggcatacctgggttgagaaaaattatcgtaatgccaattggagtcccataaaagaggactggcatcaaaaagaggaaaagggttcaaaggagatttatcatggggttcagaatcacggacgcgaggggcggtagcagggacaacagacagaaaagtttccccttcccatactcgcagtctggatgtggcaagagccaattttcaaagttctgggtgttctgagctcagaatggggagtatcacacgagccctcgggggacaatgtccttattttcccattttaagggaaagaaagagctgaacctcctatacaaagtaaaatgatgatcctcgttcttccaataagaaataaaacaagtagcctccaggcattccctcccgccacaggagcaattgttttttaaatagccctttggtacccagtctattactaaaccatatgagtcagttttggtttttttttttgagtcgaacaagcatttctgtgaaccggaccgatgaacgtttctacacaactaccaaagggaagcgggtccccacatgcactcaggaaaaagaaaagccacgttggcgcgccagatatcgggggaaccagcccccagtatttcaatgtaggttctttctattttccataagtgttggctggctgagaaatgaagagaaagagtacaaagagaggacttttacagctgggcctcccagggcgacatcacatatcggtgggaccctgatgcccgcctgagccgcaaaaccagcaggtttttattaaggattttgaaaggggagggggtgcaagaacagggagtaggtcacagagatcacatgcttcaaagggcaaaaaggagaacaaaggcacttcaggaggccaaggccagtggatcacctgaggtgaggagtttgagaccagcctggccagcgtggtgaaactccgtctctactaaaaatacaaaaatcagctggatgtggtggcacgtgcctgtaatcccagctactcaggcagctgagtcaagagaatgatttgaacctgggaggcggaggttgcagtgagccaagatcgcaccattgcactccagcctgggtgaccagagtgaaactccgtctcaaaaaaaaataaaaaataaaaagttttaaaaaaatttttttaaaataaggctgggcgcggtggctcatgcctgtaatcccagcactttgggaggccgaggcgggcggatcacgaggtcaggagatcgagaccatcctgactaacacagtgaaaccccgtctctactaaaaatacaaaaaattagctgggcctgttggtgggtgcctgtagtcccagctacttgggaggctgaggcaggagaatggcgtgaacctgggaggcggagcttggagcgagccgagatcccgccactgccctccagcctgggtgatagagcgagacgccatctcaaaaaaaaaaaaaaaaaaaaaagactgagccctcagagacacagctgcagtgaaaccattaaatggaggccagtagcatgtgaaccacacaggcagggccagagggagcacagggggcttcctggagaggtgggaggaaggcatgactgagagagagcacgggggaccctgggagggagaggccacctgttcctggcctcatgtctgtgtgcacacacgcagaggcacatgccaatgtgagcacaagcacttgggcatacacacagggacacacacaggcacacatgggcatagacacacatgagcattcacacggggacacaggcatacacgggtgtaggcacacatgagcatgcacatggggacacacacagacacacacgggtgtagacacatcagcatgcacatggggacacaggcacacacagatgtagacacacacatcagcatgcacacggggacacaggcacacacaggtgtagacacacatgagcatgcacacggggacatgtgtgtgcacccggggacacatgcatgccatggcacagcagccacacaggacacacacacacacacgcacacacgggcatgcacacgtgagcacacatggcaatgcatggaccaggcagccacacaagtgcacacatggagcatatgtgaacatgcaggcctgagcatgggggtgcatgcactgcagctgacaggcccacagacatgcgtgtatacacatatgtatccacaccccccacaggcatgcacaagtgaatatgtgtgtagacacacagtcgcacacggacacacacgctctggtccatggtggcaaagaggaccctggaaatcagcagcttcggcttcgatgttgctctctgtgaggatccctgctaggagtcagggttggccaggaccctgtccctgggctcaagtcctcctgcaggagagccaccctcaggaggggacagaccctggtgctccctgaagctgggccatgaggctgagcttgggggagagcaggtgaaggcggccaacgtggttacaggtcttgggtggctgctggccttcctggctgagccaggtttgcacctggtgctgggagctgggcctgagccttgagctctggaaagcaaccataggtgggggctggggaaaggctcccgctccaggaggaaagccaagggctccctaaggccatattgattcttctggacaatgagggggtcaaaaagacctaagaacccccagctcccatcttccacgggacagctggccggtccttccagctctcaggatggtcccatgtggcgaggcaacagcaggggccactgttcctaagacgaccggatgggggtggggccctcctgttcgcgtccggccttctgagcctctgtagtccctacagagaggaggatatggggctcaggcttccccgggagcccaaggccgggaggtatgatcgactctgcgggtgtctgtgggctcagtgctaggcccttcctgccataagcaccccccgccgtggaggagcatttgagctcacggatgctacagagaaagtttcctacagggtctcctctgagggccatggaaagccatgtgtagacactcagcctgcccccagagcctttggtgccccaggagtagagccaggagccctccccgccacctccatgtgccctgtgcctgggcgcccaagcctgtggatcccccagcatgggctaggcaggtccttcattgctcagaccccaggctttgggaggtcgcatgttttgccgtctgcatagcgaggacgtgctgggtaggaaaatgaactccaagccacggccttcctggccattctgttgtcacccgtcgtttccttcacctgctgtgaaagtgcaatcttgcttcgctgcaacctccacctcccgggttcaagcgactctcgtgcctcagcctcctgagtagctgggattacagatgccctgctaatttttgtatttttagtagagacagggtttcaccatgcctagccaggctggtctcaaactcttgacctaagatgatacgcccgccttggcctcccaaagtgctgggattacaggcatgagccactgcacccggccagttcttttttttttttttttttgacggagtctcgctctgttgcccaggctggagtgcagtggcgtgatcttggctcactgcaagctctgcctcccaggttcacgccattctcctgcctcagcctcctgagtagctgggactacaggcgcccgccacctcgcccagctaattttttgtatttttagtagagatggggttacaccgtgttagccaggatggtctcgatctcctgaccttgtgatccgcctgccacggcctcccaaagtgctgggattacaggagtgagccaccacgcccggccaaacccggccagttcttctttaaatgtttggtagaatgtaccagtgaaaccatcaggcccaggacttttccttgtcaggagttttttgattactgacaaggctggagtgcagtggcaccatcacagcttgctgtagcctcaacttcctgggctcaagccatcctcctgcctcagcctcccgagtagctaggattacacgggcacaccaccgtgcctaattatcaattttttttttgtaaagataaggtcttgctaaattgcccaggttgggttcaggtgatcctcctatctccgccttgcaaagtgctgggattataaggatgaaccaccatgcctagcctcttttttcttttaattattattttattattttttaaaatttttgtgggtacatgggaggcatatatatttatggggtacctgagatgtttcgatacaggcatgcagtgtgacagacacacatgacggactatggggtgtccaccccctcaagcatttatactcattttagtattattattttttaaatttttattatttattttatttaattttcttgagacggagtctcgctctgtcgcccagcctggagcgcagtggcgcgatctcggctcactgcaagctccacctgccgggttcaagccattctcctgcctcagcctcctgagtagctgggactacaggcgccccccaccacgcccggctaatttgtatttttagtagagacggggtttcaccgtgttagccaggctgctctcgatctcctgacctcatgatctgcccgcctcggcctcccaaagtgctgggattacaggcgtgagccactgtgcccggcctattttagtgttatttttaagcggctccacacagagcagggccatgccacaggcagcgtggcccagagtagcctcttttctaatgtaacgtttgcgactgtaaatatctccctcagcaaaatggtatctcctaagttttaagttgtttttatttgtctccaggtattttgtgatttcttccttgacccactggctaagagtgcgttgttacatttccacaaatttgtgacttttccagatttccttctgctgtgggctcagagatgaaactttgtataatacattttattctgtttaagagatgggggtctccctatgttgcccaggctggtctggaattcctgggctcaagtgatcctcccgcctcggcctcccaaagtgctgggactataggctcgtgccactgtgacagggtttagtatctatctttcaaaacacactgagacttgatttgtggtctaacatctggcctctcctggacaaagttctcgtgcgctcgaggagagcatgtgttctgctgctgtcgggaggtgctctctggacatgttggagctggtggtttcctgtgttgttcaaaactcctagggctgaagggaggtgtccactgagtgtggacactgtctcatcaggtaccatgacacaccccacgtgacctgtgcctgtgaccacgtcgctgccttgcgggcctaacagcacctgcctatgggaccttggctggctgcttcttaccaggccggccccctagagcccccctgctcctccaagccctgtttcctccagaggggtggccgcccctggttccctcctcacccctgtccacactgactctctgcagctggagccaactgggtccagcagggacttgggcctgggacggccaggggctctgcccagaacagcgagcctgggactggtcctgcccgggaatggttatttgaatcaaagcggaaaactgctggtttgaaacgtttataaacataacccaacaatacaaaagggagcagcgtaactggtcacttaggagaaaagcctcaggacctcgtggacctgaacttaggccaaaaaaaatggggaggataaatgagacagggtgacctcccggaccaggcactatgcaaccttagagtgtggcttaaacatgaatgatcatctcctttccgttagacagcagtaacaggctttaggttttaagactagtgttgacggagtttaggtaaaacggatacaacattatattctcagaggacctgcaagctggactcttccggaaagcgtgtgtgcaccaagatttgctagagcctcatgccctggaaacaacccactggggacactttgtccctagacaccctttctggtggcgtgaacgcactctagtccacgttccccactcccaggatgccgggaccgtgtggcgcaggcttaggagggagggaggtccacatgaggtcagagaaaagcgcaacacccagaccgtgcatccgggagagccagcgtgaggccccgaggccacgcgggcagacccaccgcggacgcaggggacgcaggggacgtctacagttctgcagcaattttcaagaattcgcttttctttcgtttctgttgaaatgcaggtttcagacttgctgaaattcacccgacacttgttctgagccccagaattcctctcccagcccagagcctgcagtggacaaagccaagggcctgggctgttggctgaggacccagtcatgattaacctcaagtctccttggggtgccttctactccaggctgagcacaaatgagacagaaaccagcgaactccacgcgcgttatgtgggtgcctcctctttgccctccacacacccacgcacaagtgcacacacccacgcacgcagacactgccacgcacacacccactgatgcacacagacgcacacacgggtggatactcacctacatgcacgtacacacccactctcaatgtgtccactgagcttcgtgtacacgcccacgcacacccaccctcatacacacccacgtgcacctggctccacacaacacacgggaggaggcaagcacgatgctcaggaaggcggcctctcagggcagcgtccagtgtccgtccctcccggcgggaccctcgcacgccacctctgctggagattttggcttccaaagaagagtctggtgggttcaaggctgggtgggcaggacggcaaggatacagccctgcctgggacagagccttcctggggtagaagggggatatggcagggacccgaggagagctgggccggtgggtgactaagacaggagccacgtgaagtaagaacaaaagctttactcgtgctcggcaacagcaaagcaggaggcagaggggagatgacggcccctgtcccatttccctccatggaaggcaccaggcggggaggtgggtctgctgggatgggcaggtcagcggaacaaaaggctcctgttgtttatgggcccaggcacagtggggcaggagcacgacccagaaagtagtcctgagccacaagtcagagcggagaaaacatctctgtggtcccagtcaagaggcctccgaatgaggcgcctggactgggagcaaagctctggtcgagaacatgaccttcccgggcctgagtcccactgtggtgcccggccgtgcacccagcctgcggcagagagggcggcgtcccccacaaagcctgccaggctgagcccttgcaatggccgtggctgggccaggaccttggcctggagcctgctccttgacacccagccagcctagcacccgccttcagcaacaggtaatggagcccggatggcagctccctcccaggtgcgcaagtgctggggtggaagcctgttcccgtgggatcaaccttggggctgggtcggggggaggggcactgcggccctggccatcagcctggctgtcttcgttctcccaaaacacccatcaccgcagcccaccaggggctgggagagggggggctgcaggctagccagagggtctgccaggtgcctgcatctcactggtgtggccgtggcacctgagggagcccactgagcccatagggggctctggttccccgcgcctgggacagagccaggcagccctgggtcggggtggttggtgtcaccgagaggtcggggcgccctgtttctgcctgggacaccagtccgtgtctgggtacagaagacaatggatagacttaaacctggggaaggaagaagtaggggtcagggccgtgggcggagagagaagcgggggccagggccgtgggcggcgggagaacctggggtcagggccgtgggtacagggagaagccggggtcagggccgtgggcggagggagcagcgggggtcagggccgtgggtagagggagctgatgccagagcccctgcggggccgagggcctgcccatgccactacctactcaccgtgtggggtcttgatgcaggctgaagcctccagccacgttcaccacgttatgtgggttctcaggacccccatggctcaaggtaacctgggagggaagggtgtgggcagagtgtgtggcctggtctggtctcgggccacgcctgcccctggccaggagccctgctagagcccctttgcccaccccctctccccaggccctcggggaggccaggcttggaaacagcattgaagcatggcatgagctgagtagggggacacctcaggcagagcctgggggacagaagatagggatctgaaacctccagggcaaagctgaccctcattccctccctgctccacgtgatgggacctgttccgactcaccatcaccatacacaccacacccactgcccagctggcatggggcctcactggcccgagaactgtgcttctcccctcgttcctctgccccagacaccataccccatctgtacgtgaggaccctgtgtccaacaggccaaggggcctgtccagggtccacccccagccacatgcaaatcccacctgcctgctcagccgggcatcgggccggggcagtggggcccctgggggagtcagggcggggcaaagcccaggtggcagaggcacccagagtggcgcctgtacctgctggagcagggtgtcgggcggcagcctctgcaggttctccaggtgagagtggaagagggggctgtgcagcaggcgggcgcccaggagcccctccacgatgtagccaactgtgcagtcatccggcagccgcacctgctcagctgtgctcatgaagctgcccaggctggggggaggccggtcagcacctttcaggtctcagcctccgcctcccagcccgggcagctggacccccactcacctggcccatgggctcatcttgagggcaaggcctctgctgaggcagaacccggccccaccagtagcaaaccagaacttgaccgtggtcacctgaagatggggtggtggtcagagctgcccaggacagggcttctcacccctgactcttcatgggactccccaggcatctttcttaagctgccccttaggagatcccacccaggtaacagaagcttcttggagcaaaaagagccgggggcttctgcaggccattgacccgtagcctccagaccctccccacctggcccagacaccccctctctgcccagtacggtgagggcctcctggcctgctcctgaaacaccacatgcaaaccacctgggtggatcagcttgggcccccaaccctatgcccttctcaagccagctttccacgccctctgctgtgcctcccgggctggtgtcaaggaaggcgtctgctccgatggcgtctgctccgacactcacagttctgccaccctggaccctctcggtggcctcaatggggtggtccaggctgggccgccccaggtagacgtcctggctgggtgagaagctggagagcaggtgcaggaggctcctggcgttcacataattgtcatcatccacgtggcaaaaccacctgtgggcgaggggagtcctgggcacgagggcctggcatggctggacaggaggcccccacccagcttggctctgagctctctgcgggtcgggtcagcgccgcgtacttgcgcccggactcaatgaacttgtcatactccacggacatcttgcagcagagggcctgacgagtgcgcaccgccgagcagttggtgttgatgacacggtcgcctgcgaatcagagacgggaagcacgcacgtagaggatggcactggggttggggtaaggcctgtgccccacctgcccccaagggccagggcacaacgtggctgtctgacatgcctggacaccttgcctgggtccaaccacagccctagccctcacgcgctgaccctgctggtgccaccgaggctgaagcaggcggccatcggttgggatctcttgagtggaaacaggacggaggcagctcgccctgacctggcctggaagggcggattccctgctggcgcttcttcaggggacgtggcactagccccacgccccgggaagcggctagtgtgagaggctggtggggagcagagcttggctggcagggtgggccctccgcaggccgcgtgacctgggcagcgtcggggcctccccgggcctcgggagcctgggcagagaaaggcacccacagcagcgaaggggccgtggcttcggagcgagaaaggctcggggggcagatcccgcgggcgccggggagtgggggacactcaccgccctggagctcgagctcagggtcgtccccgtcggtgaagataaacgtctgggggagaaacaatctatgaggcttctggggcgctgcccaggccggagaccgacccgccccgcgcggagcctccgggggcctgggccgggcctagaccctgggaggcggggcgggtgggcgtggggctcgccgtcggggtcggggtccggcgcacctgctggcgggcccgggagatccaggtgcgcagcagcagccgcaggcgcggcccgtggttcttccgggtggtcttgacggcgatgaagacgtcgtcaggccgcaggctgggggcagcgggccgggacgggggcgcgcgcggggccggggcgggggtccgggccggggcgggcgcgcggggcagcggcagcggcagtaacagcagcgcggccagggccgcggccagcgcgaggcaggcccggcacagcgccccacgcgcgcggctcatgcggccgccgggacccccggcgctgcgagcggagaacctggccggagccgtgggtgggcggcggcccctttaagaacgcagcggccccgccccgccccgcgccccggaagcgacggcttcgctgccccggaagtggacggcacgccgcggcggggtgggtgcaagatgccgctgccggttcaggtgtttaacttgcaggtaacgagccgaggccgccccgggcctccgcgcccccgcgccccccgccactggggccgggctgaggtcgagcaggggcgcggggcctgcgccaggagtcggtcgggcacgctccgtgccgggcctccgcgggcagcgcgcgtcgggggctgcagggccgagggcgcgtctccgccgtggctgcgcgctgcgatcgggggccgccgggccgcgcccgccccgcctcccctcccagcagctcacgggagaggttcccggccgccccgacgctaacgctctttctcccttcagcagccagccagctctgtgtcagggtcggggggtgcagaaagtcaggacagaatgagggatagctcggcccccagctcggcctcctcgtcagtgacagatctgtactgcacccctcacagcagtaggtcagacctcgtcctgcccggcacggccggggacttcagcctgagcgccagcctgtcggcctgtacgctgctctacgaggtaccttccaggacagggacccccgagcgagggaggggggagcagggccccggccgcccctgctgtggctgggcccctgctgctctgctggccgaggacagggactcagtgccaagcgcaggaggggagggagccccggtgggcccggggcctgcggagggagccgagctcttggtgcttttcccgaaggagcgcgggaggcccacgggtccggcgagtgcccggcatggcggcttttccagcctgctttgtgttaagccgaggtcctggcttctctgtgtctcccagctgggggccatgaggctccctgagatgactcttttccccttctcccaactccgtggcgtgactctcagcccagtattgctgctccgctgctcaggacagattccgggggctggtcctcctgcctcctggggttgaggtggcgtcccgttcttctccgtggcttggaggaaactacatcaggatggtggctgggaacgtgtaggggccctcagaggcccctgtgtagttggttgtcccctgtctgctttctggctttcagagatgagcggctagaatcaggcgaggggtttctgcttctgagccttagagtcttgtgaggagacccctccctgatgtggtggcacaggagcctgggtgggggcgggggtgactgggagggcacacctgggggacagcagcggcgggagtgtggtccgactggcctggaagatcttgggcagagctgacctcagagaacagtgcgggtctctcgccctcctggggcagtccccaggacgaggtgccaggtgcctggcccatgttgcagggggccgtggagcccatgcagatcgacgtggacccccaggaagacccgcagaatgcacctgacgtcaactacgtggtggagaaccccagcctggtacggagcccagtggggggaccttgggtgtctcagtcctgctgaggggtccagggcacactccccgctgcagcctgcacagcaggtagaatgatcctcctcagtgatcgctgtcgtctttttctgaccccgaaaccatcagcgtttctgattgcgcactcacatgaggcttgtagctcagcttcagatgctgctcatggagaagccagggcaggtctcctccccgctcagcctagcgaccagcagtcactagtgggtgtctatccccgaaagcccccgggtgcagggtcccactcctgaggctcctgcgccaggcccaccccagcggtcttcgtagctcctgggacagcagtcagtctcgtacccccatgcccggttctggttatgggcccagggcgacattctggctaggacagtcaggccccaactcctgaccctcagggcctggggccagggtcctgcctcccatcctgcctgactcttgtctgtgcctgctcccaggatctggaacagtacgcggccagctacagcggcctgatgcgcatcgaacggctgcagttcattgctgatcactgccccacgctgcgggtggaggccctgaagatggccctctccttcgtgcagagaacctttaacgtggacatgtacgaggagatccaccgcaagctctcagaggccaccaggtgaggccaggggcttggcgagaggaagcagaggccaccaagggagcgcgggtgtctgggactgggcccccttcctgtgccctgcatctcccacccctgtgctgggaagtcgggcgggtagagctctcgctctcttttggccagcagtggaagtgccctgtgtgtgtgtggcttctgtgtgtgtgcatgcagggctttgattccaaggggagctgttggagactgtggctcaggggccgcctccctgctggtttccccacccggctgtaggctcctggggcagcagttctctctgtggccctggtgcagactggtccctagaggtggggtttgaggccagcgggaggtgcccacctgtgtgccggttgggcctttgagggcagcctgagattggcggcttcctcccctcctccctggcccccgtgaccgccgccatcctgatggccaggtcctctctcagggagctgcagaacgcacccgacgccatccctgagagcggcgtggagcccccagccctggacacggcctgggtggaggccacgcggaagaaggcgctgctgaagctggagaagctggacacagacctgaagaactacaagggcaactccatcaaagagagcatccggcgcggccacgacgacctgggcgaccactacctggactgtggggacctcagcaacgccctcaagtgctattcccgggcccgggactactgcaccagcgccaaacacgtcatcaacatgtgcctcaatgtcatcaaggtcggcctgcctcggcgggcgggggtgggcagcatggctgggccattggggcgcccgggctcacttggctctgcgcccccccgccaggtcagcgtctacttgcagaattggtctcatgtgctcagctacgtcagcaaggctgagtccaccccagagattgccgaggtacgggccacctcctcagagaccttgcccccaggattcctgaccactgctggcccctcctgtcctcccccacctcattctcccccagatctgaatctgccttcatcccctctcagtctgggggctgggcatcgagctctaggaaatgtggagcatgggcctcacgcatgtggcttcctcctacagcagcgaggagagcgtgacagccagacccaggccatcctcaccaagctcaagtgtgccgcaggtgagggcctgggtcacgcccagctgaccccacgttcccctgttgctaagtcctcccagcccagggcagtaggctggtccctgcctcagccagggaaaacttccctggcagggcgcaggatgttgtgggcacatgtacaggtgtaggtggtgcctaaagtctgccccggggaagccagtgggtgacgtgtggtcagggtctggctgctgtcactgtgggcgtgaggcaggtctgccagcccgagctgctctgaactggggtgtcctttgcagccctgctagcacctagggcttccctgcatgcctggcttcagggagcctcctcagcattggtggggctctttccacccgtgactagagtatctgtccccagcgctgaggaacagctcccggggcaggagaggccagcgagccggctggtggtcgcgttctccctggtttccaggcgttagcggcttccccaggctctggggtcttaccccctctcccccctccccgcccccggctccttccactaggcttggcagagctggccgccaggaagtacaagcaggctgccaagtgcctcctgctggcttcctttgatcactgtgacttccctgaggtgaggagccctctggggacttgggaggcagagcatgggctcatgggtcaggctgcttctgtaggagggtgaggtctctcacaaatggggtcttaggcattctccgagcgggtgatgggcaggcaggggtggcctggcccttcactgcctgtgacgccaggtctctgctcctcagctgctgtcccccagcaacgtggccatctacggtggcctgtgcgccttggctacctttgaccggcaggagctgcagcgcaatgtcatctccagcaggtaggtgccccggtcctgcagccctgaaggctgtccccgtccctctccgtggctgctgcttcggccttgcatgtcctggccccctggccccagcgttttctcaggtgtttgtctggggactggtgtcccactggccacttggagggaggggcaggcagaggacagagttctgaggggtctgcctcaccagctccttcaagttgttcttggagctggagccacaggtccgagacatcatcttcaaattctacgagtccaagtacgcctcatgtctcaagatgctggacgagatgaaggtgggccccgcctggggtaggggtgaggtggggccctgcctggcctcctgtcctggtcctgaccagccccttccccaggacaacctgctcctggacatgtatctggccccccatgtcaggaccctgtacacccagattcgcaaccgtgccctcatccaggtaagcgtgggggtcaggctggcacacggcaggcgggcatgcagggggctgtggagctgacttccctctgccctgcagtatttcagcccctacgtgtcagccgacatgcataggatggcggcagccttcaataccacggtggccgccctggaggacgagctgacgcagctaatcctggaggggctgatcagtgcccgtgtggactcacacagcaaggtggctgtgggctgcggggcggtgggggcagctgggggtgagcctgggccccgctgagcttgtgcctgcacagatcctatacgcccgggacgtggatcagcgcagcaccacctttgagaagtctctgttgatgggcaaggagttccagcgccgcgccaaggccatgatgctgcgggcagctgtgctccgcaaccagatccatgtcaaggtgggctggcttgagggggggcaggcgcacggcgtgtggggcctggtggctgtgagctgctccttgtctcccctgcagtccccgcccagagaagggagccagggggagctgactccagccaacagccagtcccggatgagcaccaacatgtgaggggtgaaccttggcctccaggacatctgcaccccctccccacctccacggacctcggacctccaggcggctcagtgctgcctgcggcccagctaaggggcctggccactgggtgccacccagcctgtgtgccctccctggggctgaggaggcaggcggctgctagttgtggcccttcctggaaggagaggcctgcagggctcgaccctgtgggtttctgtccccagggagcagactgtgcggcacccaggcccagtggcaccatttcccagacccctcctgttcccgcctcagtcaggtgcagacaagtgggcggtgtccattaaagagcagactcagcgttgctcttggctgttctttcctgccgtgcaggctctggtcacccctgggtggccttgggttcctgagggctgtctccctgggactaggcttggaggcagggcctggtgagagaaatgagaagcctggccctcagattcaacagcccccagcagcagccactgtggcctcgcaggcggtgcttccaaggctgtgaggcatcacgaagctcccggaggctttggccacttgcctatggaggcgcctaggggaggtggggaggggacctaagcccccacttttgtctacccagatgctgccttcatttagatgtatcctgttgttcagaagcccccactggccccaaccgcacctgccccggctcatgcctccctgggtctgagagggcagtggtcacaggctgtgggctctcgcatctttgaaatgatttattgttcacttttgcacacgcgtgctgaggacagggcaggtccagcctggggcctgctccccactgcagcatttccaggcccccagagtgggccgaagggggacatgggcgtgtctttccacattaagtagcaggagattccctgagtaaaaggcattttcttaagtaggacgtgtccaggctccagcagcagtcctgggggtgggggttgtgggccttcaggccagggcactgcccatgacttcggagaagccacctggtgttccaggtgctgctggctgaggctcctgcagctcaggctgggcctctttccaggccagagacttctccaatttggttttaaaaagcaatccgtgacctggcagagcgagtgagaggagtcgggggtcaggaggcggagggggtctgtttgcctgctgcggggcgggtggtaggcgccctcacctgggcagtctgcagtctctttggaggctcgcttcttgcagcagccgcggcacaggctgaacacacatctgttgccctgggcacaggaaatctcgggagcctgtggccagcaccactcccggggccaggctggccagcaggggagcagccccactggggaagcctctgccagatgcccacggcctggatgcagccctgggaactgctcccaagccagatgcctctccctcacccccacccacccagactctcttcccctccaggcctgggcaggggcttggctggaagcaaggggccgtcctgaggcatccatgccaccttgagccacgttgcaaacccagctgggcgggcaccagacctgccaccccaagcagtgcagagaccaccctgcccacccccaaagctgaagccttggtggcttgcagccggaacccactcacctttgggtttccacactggtcacactttgcatattttgctaggaaaagaacaaaagggtgctggtgagtgagggccagggtgccctggctgtgggggctgccccgtccgcctgcacggagcctgctgatggcgtccatgccagctgtggccagccaggccaggaggctcagggagggcagaggatgcaggctggccacgtctgcttttccttccgtgagcaatgggtgaggggatgcagggggcaccatcctgcaggaaacggataggaagcaggtgggctggggggccgccgcaggacgagcagccttatctgtcctacccccaggcagggacaaggggagcagttttcctgcccacagggtccaaggggggttccatgcccttcagttccaggtctcccaagcaaaagggccaagaagggtcaaatcaagaattcagcctgaagccccacttcctgcctctcccagctgcctcattcagtggcctggtggggggcagtgtggcaggcagggactgctggcaccagcctgatgtggcagctgctcttggactggccagcgccctgggggttacatgggaaggtttcagggttatcgctggtctcccctgcagcttgtaaagttgtcagagatctgggaggctgccacctgttgagggcccagatgggctggcccaggatacggcggcgaccaggggtctcaggggagacagcactaggctgaggccttgccactggtggctaagagaggggcgagcagcctcgtcccgtgcctttggcccagcaacaagacccatgcacacactcccggggaccccagcctccctctcagcagctgctcaggtgtcctgtgtgaggctgggcaggggcagccgcagggacccgaggccctgagctgtagacgagcttcacctggctgaaaagcttgtcccatagcctcatctgattcactgagcccatgtcccacatgcacgggctgtggcctgcacagggtccccgttctgaccccaagtctggctgactactccgccaagccctccaggtgtctgcttccagctctgggccttgagccttgctgaccacaagtctgggttcctgttactggcaacagggaggatgggggtgatgaagaggctctctcgggcccatcagcggaagcagcacttacgcttcagagaggggtcgaaggtcttgtgggggttcctcagctgcttcttttgcttgttcttggacaggacctccgtgccaccctcctcttcctccagggcccgcttgctgcgcgcacctgccttctccttgctcccctccctgggcctgaggggagggcagcgggcagagcccaaggacactgtgagaggggcccagcagccacagccacacgggtctgagtctgggtgaggggccaggcggccgtggcgagtgccgctgctgtgaggagtgccctcctttccctcgggcagcccattcaggactcgtcactagggagtccggggcctctgagatggagtccgcagctcgggcagccccaagctctgaaccaccagctccagggagggctgtggccacggatggcctcacctctgagaacccagcagaagctggggtcaacctcttgacccacgggcaaatccaccaggatcagaggagctcagagaagtatgttatggaagaaaagatttaaaatccgagcgtccactgagggaggacacagctgagccaccagcatcctccaccaaggacaccgaggggcacgtggaaggtgtgtgctgctcggagccgaggcctccctcctcctttcccttgggcaggagatgactgaccataatggctgaggacaagcagggcaggcgcagcactgtgggcacagggtggagcccacaccttggtgcacatccccgcccagggctggctgggctctcaccccggccggatgtagggctggcagatccagtggaagggcaagtcgccggtgggcttcgctccctcctgcctggatatctcctcctgcaaaagcccaaggccctggtcatggccccagcccctcaccccctgcaaggccgggctcccaccagccccagcacctgcctgacaccgcagcttcagctcctggctcacagcagcgatgccctccagggtcttcaccttggccagctcctctcgcagctcctggtgcacctgcagcctgagacagaggccctgtcacgcaggctgggctcccggctccaccgtcaggccccaggctgagcactgggcacacggggacctgtgtctcttcctgcccaactccactcctaagtcaccccagcccctcaagacctgacttagcagcaagttgttttgacaaaacctgcaaaatgccccaggtggggtctgacggaatctgcctgggcggccctccaacgtggcttctgccttagggggcaactcacgtgtggtgccacagcttgaagaggtgggcccggacgtaggacagggggcaggggtgctcccgcacgatgtccagatactcctcggccagctcccacacggcagggctccggccctcgaacagggcggggttgtgcaggttgccctctgtgggaggaggagcggggaaggacacctcgtgggttgctccaggtggacggcacaggaaagcctgggacactcaggacacccttctgtgccacctcacaagggacaaggccagctcaggcccatcagagcagactgggattgatgaacaccatctgtgaacagcaccatggggagggcagtaggcagtgggaggcaccgacctgggcggtggtatcaggccgtgtgcatggggccctggctgctgtcctgggccctgcccacctgcgctcatgacgccctgcacacccgtgtcccggaggcagcgctccacgtcctgcaggcactggatgttcccgttagcaaacacagggatggccacagccttcctgttggcagagaaatgcctgtttccacccgcccggaacagcacccaggtgatgctgcccccagccacggccccctgggtggtcacgggcgtcaggcgtgccgagcaccctgaggtgtggagctgggacccccagcaaagccccaaggactgagggctgtgtcacccacacccactcaccgcacagccttgatatgctcccaggacgctgcacccgacaggggccccttctgctccttggtgcgtccgtgcaccgtcagcaactaggacagagcagtggtcgcttgacccctccaagccccttccgcccctcagagccccctccgcccctccacgccccctctgcccctactccacccctccgagccccctctgcccctcccagccctgtgccccatgcccgactgcagggacctttccctcaccatatcagctcctgaagcagggctgaggaatggccatctggggcctaccccaaggcctctgcactctgtgggaacctcaggctgcatgtgctgcccaggcccatgcaagagccaggccgggaagtggcagcatccccactgcccaaggccaaaggtgtgggagggactgactccaggctagtggggcactgggggggaaagtgggtcctgggcctggcagcccctgtgcaagctcatccccgggtcaccaaggttgctgtccaccttcagaaggtgagtgtcttgaggggcacccccggagacagcagcccatccaggcccgcgccaggccaggctcagtgtgcggggaacacgggcaggggagcagctctgctgacagcctggtggccccttcctcaccctctagggagactggatgctgagtatccccaaaggaggccctgccggcctctgtgacactaggaatatgtcagagatgccgacattactctctccacagggacaaaaccctggagccaggaaagcagtttctgttgtagaggcctgggcttggggtggtggcactcagagccagtggggacaggccagtcaggagggccactgcccccatgaggccgacggtgcacggtgtctggacacaggaagagcctcagctatgtcctctgcgcaaaggcccagctgaggcccatgacacccccgcgagcccagggctcacctggcagccggccttctccagcatctgggcgtacctcacggtcttgtcaatctccgggaagacacggattttgcacgtgacaggaacagagagtttctcgtgggccagcaaaactggggagaagagaggcagcttctgagggggccatggtgttcccactttagcggccaagccccagagcccagggccctgcagacagcggagcccaggcagctttgccgggaggctgggaggcagcccgggccaccatctgggtgtctccctcaggttgctgggcaggctccctccgccatacccccggccctccgaagttcaaacaagcagggccaaggccggctctgtctcccaggacatctggggctgggcccgagcaaggactctgccctggcacctactgtctggttttaaggggtgggtggtgcaggacaggcaacttcacagccacctccttccagcagagaggctgctgtgggcaggaagccccagggtgatgctgagaactcctgccaacgcctgtcctctcctgagccccaaccaagtggacagtgcccatgtgtccctcttgagggtctctgggggtccttcaccatccacccagccaactcactcattctttggagcaggtcccactcgtcctgcagaaaggcgccatagtgacctgcaaggagcaagcatggcctggctggcacctgtgttaaggctggtggggccgaagccttgcaccccctctgcaccctttcctgcatccacgcaggccaggagctgccctgtcaggcgggacacaggtccccagaaccagcagtgtctccagttggggcagtgggacagtcagagcagtggtttgtcggcatcagactcaggggctctatttgcccagctgcctaagctcagaaggtgctgaatggaacccccaccctgcacggtctggaaccaagtaacacctcctcaggggcccggtgaggtagcaggctcagccccacacacagcagtgcaagggggtaatggggaccctgtatcagcaatcatgtttatgcagagggagctccctgagggaagagagagccagtagggctcggcccctagcccccaaggcctgaggacagccaccctccagaggcggagcacagaggacagctggctccagcctgagccactgtcacgacagaggcagggcctgccgtcctccaagctcaccacacctggggctgcactgagctggctctggcccctgccccaggtgcccccatgctccacatggagctcacctctcttggctatcatctgtgggcagcccaagttcaggtcaatggcgtcacagtaatcctgagccaggagagccgcctgaacaaacacctccgggtcattggcacagaactggagaagatgcaggagtcagccacgggcccagccaggccctagtcccttgctgcccagccctacgagaggtccagtgtgaccccatgagggtgtgggcccaggttcactgcaggagggtgctctgtcctgcggaggcttacaatatgacaaagccgggaggagtccccaagccacccggatttacagattttcttctgaactgtggcagaagccacaatcactgacttctgaagagcagagccatctccactggttctgaagagggagtgtgagtgtgagaggcagcaatccagaggccccagcagggctgcaaacctcacagcacccaggctgcctgagccactcctagagaatggggttggattctggcaggtgcacctggcagccctggctccaccacaggaatcactgctgtggctacgtggactctacatgcctggtgccaccttctccctctcctcctggaattgagctgtctctggaaaggctgaaagtgatgtcccgccacagagagaagggtttttccccaggcattccaggaccgggaacccaaccgcggccgcggccacagcccctcctgcgcacctgcacgatgaggggccggtcctcggggcacacctcgcagtacaggttctccttccggtagttggcgtcgcggacaaagacctgggcatgcagcatgggcgtgtagcagagctgtgccccgtggcgccggctcagcagcctccaggccagctcgctctggtccaccatgggggccacgacgtggcgggcccctcgcagggtgcggctccagaactcgaagccctgcagctttggcatcgtctccaggctgggggaaaggcgcagacccggggttcagccaggcccaacgaggggcttaagactcaactcagaggcagcggtcacccttctaaggccgctccagtaccaccgttgggtcacacgcgggggcactaaaggcgggggtcggtgcaggctggagaacggccactccagtgccgccacctcctagcggacctcgggggagccgctggacccctgggacttgaccctccctggggagcgggactcgatgtcggcctggtaggggactggcgtgaagggggaagaaaccttgacgccagcgtccccgcgggcctggccctgagcaggccgcccggcggtgaagttaggacccccggccccttcccgggagaatcggctccgcgccgggccaggggaagggcagagcttccttctccgcacccggccaggcggcccggctggcccgaaacgccacaggggcgcccctcgcgagactcctccggagccacgcggcgggcagcgtttgctgtgtgaagtgacaggagcccacacgcctccgcgtcctcaccgcgcgagggccccgccgtgtccgccgcgcgcctttggctccgagggcgccgggtgccggtgtcccgggcccgcccctctccggcctcgccgccgcccggggcccctgcagctcccggggcgccgcgaacgcccgcaccgcgccggggccgccgccgggccgcagccgggcccaaggctccgcgccgccaccggaaggtgcccggtcctgcgcggtccgggcggcccacggtgcggcgggaaacgcgttccccggaaaccgcgcccggctccgaggggaccggcgacgagaggtcgcggcgcggggtcggaggtcagaggctgaggtcaccaccgtacccgtcaggccgtggctagagaggggtcggggctcgccgggactcaccgacagctcgctggaaacgaggcatgtggaaattgggcctcgctgaggcgcacataaggcccgggccgcgggtagaccgtgggcgctgaggccctgcgctgcccagcccccaagttcgcattgggggcttcatcccgttatatcctaaagcggccccagagccctgcctcgaacccactcacctgccgcctctgaaagccactcactttccgccgctgcgttgcggaaaatcaccctccagggaccttccttgcccgccctgggtttccgcagccgccagccttcgatcgactttcctacccgccgtggaccctccttgggttatttcgagctgtggggacccactgggaaccccagagtggatgtgaaggttattttaaactgaaggcatttgagacccaacagatgtaaaaagcagctttgtcagagctttccatatctgagagcgaagcccgaagttgaaccaggacattcagtacctaaaacatgtgaaatctcttgggcccccggaatcactaaggaaaactcaggctggaagctgctcagggcaaacctgcctcccgctctattcagagtcaccctctgctcgctgagatagatggatatctgactgactcctttgaaaaggctcatcagaaggctgggcgcggtggcgcacattgagaccaggagttcgagaccagcctggccaacacggtgaaaccctgtctctactgaaaatacaaaattagccaggtgtggtggtgcgcccctgtagtcccagctactcgggaggctgaggcaggagaatcgcttgaacctgggaggcggaggttgcagtgagccgagatcaagccattgtactccagcctggcgacagagcaagactgatcaaaaaggaaaagaaaaaaaaaaaaggctaatcagaaactcaaaacaatgtaaccgtttgtgtatcacctatctgtgaccaggaagctccctccccgatggcttttgctttaaattgtcccgcctttccagactgaaccaatttttttttttgagacggagtcgctttctgacccaggctggagtgcggtggcgtgatctcggctcactgcaacctccatctcccaggttcaagcgattctcctccctcagcttcccaaataactgggattacaggcacccaccaacacacccagctaattttagtatttttagtagagatgggggtttcaccatgttggccaggctggtctcgaactcctgacatcaggtgatccgctggcctcccaaagtgctgggattacaggcgtgagccaccgcagctagccgctatgttcatcttacatatattgattgatgtctcatgtctccctaaaatgtataaaaccaagctgtgccccaaccacctcaggcacatgttgtcaggacctcctgaggctgtgccatgggcatgtcctcaaccttggcaaaataaaccttctaaattaactgagacctgtctcagattttctgcattcacagatagaacagccttggtggtcttcagaggtggccagatgtccctggtggactgcaaggttgggtgcacactaaggaaagacaggcgagggccccagctgtccaccgccctggctgaacgtgaggctttgtacaagcaaaaagtaaaagccaagtccaaattgtaaaaactacctgaattccaaatgcagccacaacccacacacagcgccatcagcagaggctggaggccctactggttcagaatatttaagcacagtatcgaaccagtaattgtaaaaggtaaaagattttttttttaagacagagtctcgctctgtcacccaggctggagggcggtggcacgatctctgctcactgcaagctccacctcccaggttcaagcgattctcctgcctcagcctcccgagtagctgggactacaggtgcccgccaccacacccggctaattttttgtatttttagtagagatggggtttcaccattagccaggatggtttcgatctcctgacctcatgatctgcccatctcgacctcctaaaatgctgggattacaggcatgagccaccacgcccagcccagatcatatgaatcttttgccttttagccgggcgcggcggctcatgcctgtaatctcagcactttgggaggccgagacgggcggatcatgaggtcaggagatcgggaccatcctggctaacatggtgaaaccccgtctccactaaaaatacgaaaaaaattagccgggcatggtggcgggcgcctatagtcccagctactcgggaggctgaggcaggagaatggcatgaacccaggaggcggagcttgcagtgagccgagatggcaccactgcactccagcctgggcgacagagcgagactccgtctcaacataaataaataaataataaaaatataacttatggtgtataacttgtaactataaagaggttataatatatagagacatataattatatgaaaaatgcagcaaaaaggaagagggaagggaattatattggagcaaagtttctgtgttttactggaattaagtattaatctgaagaagattgtgataaattacgatgcttgttgaaatccccatagtaatcataagaaaataaatacattatataggccaggcacggtggctcacgcctgtaatcccagcactttgggaggccgagacgggcggatcatgaggtcaggagatcaagaccatcttggctaacatgatgaaacgccgtctctactaaaaatacaaaacaattagccaggcgtggtggcggtcccctgtagtcccagctacttgagaggcggaggcaggagaatggcgggaacctgggaggctgagcttgcagtgagcggagactgcgccactgcactccagcctggatgacagagcgagactctgtctcaaaaaaaaaaaaaaaaaagaaaatacattatattatatataaaagaaattaaaatggtacagtggaaaatatccatttaacacaacaaaggcaatagcagaacagagaaataaaaaaatacatacgaaatacataatttttgtaaaaatacagaaattagccaggcatagggctaatttagtagaaaccccatctctactaaaagtacaaaaattagccggatgtggtggcgtgagcctgtaaccccagctactggggaggctgaggcaggagaatcgcttgaacccaggagggggaggttgcagtgagctgagatagcaccactacactccagtcagggtgacagagcaagactctgcctcaaacaaaacaaaacaaaaactaaacaaagaaaaaaaactagtggcatatgtaaatctaactgtatcaataataccattaaacggtaatgaacactccaagtaaaaggccaagattttcggagtgggttaagaaataaacaagatccaactatatgctctttacattcaatataccttatttttttattttatttatctttttgagatggagtttccctcttgttgcccaggctggagtgcaatggcgcagtcttggctcactacaacctccaactcctgggttcaagagatcctcctgcctcagcctcccaagtagctgggattacaggcacccaccactatgtctggctaatttttgtctttttagtagagatggggtttcaccatgttggccaggctgatgtcgaactcctgacctcaggttttctgcccgccttggcctcccaaagtgctgggattacaggtgtgagctacctcacctggccacaatctacacactttagactcaaagacacaaaccggttgaaagtgaaaatacgagaaaagatataccatataaacggcacccaaaagagaactggaggctgggcgcaggggctcatgcctgtaatcacagcactttgggaggctgaggctggcggatcatgaggtcaggagatcgagaccatcctggctaacacggtgaaaccccgtctctactaaaaatacaaaaaattagctgggcgtggtggtgggcgcctgtagtcccggctactcggggaggctgaggcaggagaatggcgtgaacccgggaggcggagcttgtagtgaagtaagccaagatcgtgccactgcactccagcctgggcgacagagcgagactccgtctcaaaaaaaaaagagaacgggaatggttatactaatgtcagacaaaatagatatgaagataaaatatatcactagagacacatacagactctttttctttctttctttctttctttctttctttctttctttcttttttttttttttgaggcagggtctcgctctgtcacctaggctagagtgcagtgatgtgaacatggcttcactgtagcatcaacttcctgcattcaagcagtcctcctgcctcagcctgtcaagtagctgggaccatagatacacatcaccatgtccagctaatttttttgttttttgtagaaatgagggtctcactttgtcacccagagtggtctcaaactcctgggctcaagccatcctcctacctttacctcccaaagtgctgggattacaggtgtaagccactgcacccagcccataccgatattttatgatgataaacatgtccattcattagtaagatgtaacaattagaaacacataagcaccaaacaatagagcccccaaattaataatgaaaagagtgaaaaaaaagaagggagaaatagacaatttaacaataatagttgaagatttcagtaccttactctcaataatgaaataggacaactagacaagaaactggcaaagatgtaggagatttgagaaacactatcaatcaatctgacttgacagacatttatggaacacttcacccatggctacaccatatactaggccattaaagaagacacaataaaacattttccctccagcctgggcaacagagtgagacttcatctcaaaaaaaaattaaaattaaaataattggaaagctattctctagccacagtggaattaaattagaaatcaggccacacacactggctcatgcctataatcccagcagtttgggagactgaggtgggaggattgcttgagtccaggagtttgagatcagcctgggcaatagagtgagacctcagctctacaaaaaaaaagttaaaaattagttgagtgtgttggcatgtgcttgaatcacagctacttgggaggctgagatgggaggatgttttgagcccaggaggcaggggttgcagtgagctgagattgcaccactgcactccagcctgggcaacagaatgagaccatgtctaaataaataaataagaaacaaacaaaaatagaaatttgaggtatgcacaaatacttgaaaattaataacacacttctgagtaacccatgggtcaaagaagaaaccaaaaggaaaatttaaaaatattttgaagttaatgcaaatgaaaacacatttcaaaatatgtgggatgcaataaagcagttcctaaaaggaaaattttggctgggtgcagtggctcatgtctgtaatcccagcactttgggaggctgaggcaggtgaatcacctgaggtcaggaatttgagaccagcctggccaacatggtgaaaccccgtctctactaaaaatacaaaaattagccgggtgtggtggcgggtgcctgtaatcccagctactagggaggccgaggcaggagaatcacttgaacccaggagatggaggctgcagtgagctgagatcatgccactgctttccagactgggcgacagagcgagactccatctcgaaaaaacaaaggaaagttttaactatcaacacccatgttagaaaagaaaaaagatctcaaatcaataatttatgctttttttttttttttttttttcctgagatggagttttgctcttacgctcttactgcccaagctggagtgcaatggcaggaggaggaggttgcagtgagccgacgtcgcaccactgcactccagcctgggcgacagagtgagactctgtctcaaaaaaaaaaaaaaaaaaaaaaaaaagaaagaaagaaagggcagaaatgtccctatttgcacaaactatggatacataaaaaaacatggatggttctcaaagttatgctgagtgaaacagaaaggccaatctcaagaggtatatatgattcaatttatataatgctctcggaataatagaattacaaagatgggaaacgtcaccaggcccctggcttggggtgccttccttccccatgatgggacacctgcctttggattttgccttctcacccctccaggcgatggaggtgatgggctggggggccacagccaggctgggttgaccctcggaactggccaagcttccaagaccctctctttatcatgaagtctgctttttccattaacaatataattacacctgctttttaattcttactgttttcttggatttttttttttttgagatggagtctcactctgtctcccagattggagtgcagtggcgcgatctcagctcactgcaagctcctcctcccaggttcacgccattctcctgcctcagcctcccgagtagctgggactacaggcgcctgccaccacgcctggctaattttttttttttttgtatttttagtagagacagggtttcaccgtgttctttaggatggtctcgatctcctgacttcgtgatccacccgcctcggcctcccaaagtgctgggattactggcgtgagccaccacgcccggccaaatagtattgttttagtgttctattttatatcctctattggcttcttagtgattcttcattgtattgctttgtagttgttctagggctactcaacatatatcctaagttttccaaatgtctttagaattaatatcatacaattcataccggacacttccctctttctatcatacttccagctgcagaaatgtaataaatgtatgagtatagtttccttgagccctcggtgacatacatttccttgttccttgttgacgtatattttacagctacaagagttacaaaggccaccctacaaaactttttttgtacagtggtgcagtcatggttcaccgcagccttgacctcccaggctcaagcgatcctcccatctcagcctcccaggtagctgagaccacaggcaagcaccgccatacccagctaatttaaatttttttttgtggagaagggatttcatcatgttgcccaggctggtctggaactcctgggctcaagcagtcctcctgccttggcctcccaaagtgttgggattacaggcgtgagccaccatgcccagccggatgtgatgttttgattgttttttttttttgagacagggtctggctctgttgcccaggctggagtgcagtggcatgatcttaactcactgcaacgtctacctcctggactgaagcgatcctcccacctcagcatcccaagtagctgggactacgggcacgcaccaccacacctggctaatttttgtattttttgtagagatgggtttcaccatgttgctcaggcttgtcttgaactcttgagctcaagtgatccacctgcctcgacctcccaggcgtgagccattgcacccagccaatttgatgtatgtttaactcattactgctatgattcattttgacgctcgaatcgtcctagatttggccggtgcaagcccctgcatgcagtctggctcttgtgttcacatcactgtttttgttgtttttgttttctgagcgcttcctcgttttctgtactttccctcccccaaccctggaatcaagcatgttttgtagggagccctggttttgtcagtggtagtggtgtttagagaccacgattttagtaacaggtgtcctcattactttggggctattgttattttcaggcttttttagcagaccaaatttaaaatgacgttaatacagatatgcacacatgtgcatgcgtatatcgttttaaaggcatgcgtgtactgatgactgatgccttcagttacagtccatcacctccgctatcttctctttctcccattctgtatttctcttctgtcccatttacaatacatcttctaaaaaagatcaagatttggctgggggcggtggctcatgcctgtaatcccagcactttgggaggccaaggtgggcagatcacctgaggtcaggagttcgagaccagcctgactaacatggtgaaaccccatctctactaaaaatacaaaaattagctgggcatggtggcaggcacctgtaatcccagctactcaggaggctgaggcacaagaattgcttgaacccgggagtcaaggtttgcagtgagccaaaatggcaccagtgcactccagcctaggtgacagcgagactctgtctcgaaaaaaaaaaacaacaaaaaaaaaactagatgtttttggaattctttctatctttagaacatgcccacggaaggtggttcaggttttctcttccgtgtggttaccacatcagtttaatgtgcagtttggttcatttgtttctgtttatcctcaactttagttttgtccccgtttgtagatttaattttttttcacatatataagctgagggttagggttagttttgactttccaaaacatcaaaactgtattgaaaggcatatcagagaaaggtcccttttactactatttcttcgactcctttccactcacactggacttatccttcctgtgtttctttctgcaaaaataaggacacacacacatacatactcttatttctccttatcttttttgtttgtttgttttctttttgagatggagtcttgctctgttgcccaggctggagtgcagtggtgcaatctcggctcactggaagctccacctcttgggttcaagtgattctcctgcctcagcctcctgagtggctgggattacaggtgcccgccaccacgcctggctaatttttgtatttttaatagagatgggatttcaccatgttggtcaggctggtctggaactcctgacctcatgatccacccacctcagcctcccaaagtgctgggataacaggcgtgagccaccgtgctggcctctccttattttttgtttgttatttttatattttatttcttaattctttttttttttgagatggagtctccctttgtcgcccaggctggagtgcaatggtgtgatctcggctcactgcaaccttcgccttacaggttcaagcaattctcccacctcagcctcttgagtagctgggattataggtacccgccaccatgcccgactaatttttgtattttgtagagacggggtttcaccatgttcgccaggctggtcttggactcctgacctcaggtgatccacccacctcggcctcccaaagtgctgggattacaggcatgaaccaccacccccggcccattactttttgtagagatgaggtcttgccgttttgcccaggctggtttcagacacctggtctctctttttttttttttttgagacggagtctcgctctgtcgcccaggctggagtgcagtggtgcgatcttggctcactgcaagctccacctcccgggttcacgccattctcctgcctcagcctcccgagcagctgggtctacaggcaccggccaccacgcccggctaattttttgtatttttagtagagaccgggtttcactgtgttagccaggatggtctcgatctcctgacctcgtgatccgcccgcctcggcctgccgaagtgctggcattacaggcgtgagccaccgcgcccggcctataataagtactttaatgtctttggctgctgattccaacatcagtgtccggccagggtcggttttgattgattttctctccctgtgggtcttgttttcctgcttctttggctgctaatttttcactagttgccccagggattgtgaattttacctaaatatttttgggctttgttctgggatggagtaagtttacttggaaacaatttgaggccaggcacagtggctcacacctttaatcccagcactttgggagaccaaggtgggcagatcacctgaggtcaggagtttgagaccagcctggccaacatggtgaaaccccatctctactaaaaatgcgaaaattagccgggcgtggtgacgcgtgcctataatcgtagctactcgggaggctgaggcaggagaatggcttgaacctgggaggtggaggttacagtgagctgagattgcgccaccgaactccagcctgggagacagagcaagattccgtctcaaaagaaaaaaaaaatttatgctttggggtcttgtttgtaagatttttgttttgttttaggtgtaccagcgctaactagtaaccagctaatagatcttgggccttgagacacacccatctgagtattcaatgtctcacgaattctgaggttttctagtctggttggtaggaacaggcactggtttccagacctgtgcagtatctggcactgttccgtctaatcctcctgctggtttcctgctcgcacgcattgaaggtgcttggcctggtgctcacaggagagcccccgtagcctcctgcctggcggtcccgggacagcccctgcaccccgccactgtctgccagctccccccgggtgctctgtcctgcaatcctcagcctcattttccccccggactctcagctccacttcctcaactcggggggtctgctggactccacctctcactgtgcccggcctggaagctgccaggcagaaggctgaggttaccctagggctcctggcaccttgttcccacccaggggtcaccgtccttctttggcggaggcctggtatccccacagccagcacctcctgtcctttgcctggattttcagctgtttccggtgggagggtgaatccaggcctcgctactctctggatcagaactccaattcgttacattaattttcattttaattcgaaagaaaaaataactgaagtgaagataattgtgtgacttaaggtaactgtatcttcataacaaagatacgtggtttctcttaggtctccctgaagctcatttgcaacttggatgcacctcaggcccatcagagcgcctcctcccctggcagcagctgagccaggaacttcagagacccctggacaccacattccggtaccggagagccgggagaagcaggaggggtgacaagagcccatgtgctgggcactacccgccttgccctgcagggcctgaggctgtggagctaaagcagtttagttctgaggccacccccagataggcctgtgagcctctgtcctccctggtggccctgagcctgtgtgcacggctggggtgggagtggccggaggaggggtggagagaggccagaggggaccacggctgaagggagcagctgcctagtgttgggggaccgcaggaggggtgtggctgagcctcgctccgatgcccgcctgctgtccacactcacgcctggacactgcccacctgcagccgctgcaccaggcccacccccccagcagggcccgtggtgttcactgtagtcctggcccactaccctgccctgggagatggcccctgcgcccacccctcccctgcctctccagcaggggctctcccagccccccacccacctctgtgccttggcactcacactgaaagggcctcttctgtgggcatgctgtgccttccggaaccccgggctggcctgctttgcccattcccgaaatccaatcctggctctcgctcctgcccatgcctctaccccaagctcatgtccacccagcggccccccgcacagccacccgtggggtgctgcccttatgggtcctggaggctgtgtccaccccacccctcgatgccgggggtccaggtgcccagggctccctgtcccttgctccctcccagcctccactcctttgcctaaacccaagtcttctgggtcaacctggccagccagtggcgctattgacaccgtcttggtgaggctgtgacggcatctttggcagggcgaatgcctgcaatccactgacttcaagcaaatactattctccacgaggggcctctcctcagctgaagccaacttcccagtgtctgtacctcctacacgtttctcactggtggtgtttcttggccagagcctcggtacccccccccccgccagtcccagcgctttcccgggaagcccggggctgccacgcgggctccttcctcactccccggcccagccccggctctgggacatggcctaggggtgtgtgggaactggggaccagaggacagagggcatccccttcacggccccgtgactgggtggggtggagctggagagcttgcagctgccaggtcagggaggagggaagaaaggacggtggtggagatcacatgcggtttaattgtgggaggctgagagcagcatttttaccaaattggtgtaaaaatgaaacggggtccagacgtgtacactgacagttacagtaaatttcaaaatccaagcagcaatttgaatcatttcttgaaaaacaaacacagacaaacaccaaacatggagttggtgcccggcgccgggcataagggcagcaccccacgggtggctgtgcggggggccgctgggtgtggccgggccctgtgtgcctgtgcaggggcccagctcctcggggactggcccacgaccccccactcagcgggctgagccaatgcctggccgagagggggccgcagccagcaggcttgggtggctgcccgcgcccgcaggggacatcggggaaatgggggcagagtgcgggacccacacgctgcctgaggagtcttggcagggtggacaggcctgggggtctctaccagcaatgcaataaatatgcaaatccaagcacagaaagaccaagcgcagaccccacgggcgcacgaggcccagcccagttcctgcgggcacgggcaccaccggctcttcacagaccaggagtctccaagtcggcagctctggtgtccccgaggtgccgtgggaggcggcgggtgggtgggacatgcctaacacctacatctagcagcctcggggggcagtggcactgggccggacagggtcccaccggcaggacccttcaatcccgttgcatggcgggggtggggtggggtggggtggggatggtggagtgacctccggtggcaggcgggggcacgggcctagccctcccgcacgctcacgcgtggctcagccagggagctgtggatgatgctgatgatggactccaggccgctgccctccagcagcgtgcggtggtcaccctcgatgacgtggacggatactttcccgtcgcatacctgcaggggatgcgatcagctgccgtcccaccccactcctgtccctgtccccgttcccgtcaggccccttgcgcacctgggagaggttgtagtccgcgcccaggtcctcgccgtaggcgccacccgtcttggcgcgcagtagcatcacgttgccatggtacttggccttgggtgtgtactgctcagcggcacgcagcttgtagtagaaggaccgggccgcaaagctcagctcctggcggtccaggccctggtggctcttgatgatcaggtccacggcggctgccacacgctcctctaggcccttcagcggcagcagcgcctccagcacctgtggggtcgggctctgagcaggtgctggcagcacccacagcaccggcctgccctgtgctacactgcgggtgggctttttttttttgagacgagtttcatttttgttacccaggctagatggagtggggcgatctcagctcaccgcaacctccacctacccggttcaagcgattctcctccctccgcaacctccacctacccggttcaagcgattctcctcccgagtaggtgggactataggtgagtgccaccatgcctggctaatttttgtatttttagtagagaaggggtttctccacgttggtcaggctggtctcgaactcccgacctcaggtaatctgcccgccttagcctcccaaagtgccgggattacaggcatgagcaaccgcatccggccgggatcggctattaaaggggtgaagttggggggcctttaacgctcttcgcgtcccatcccatccttcccttcccccttccgttcctgcccagtactctgggtcctgcggcctcaggggtgtccaggacccaccctgttgtgctccatgtccgtgaactgctgcacgaagaagcatatggcctccgtctcagcctcagcctcacagcctggggtcagctttgcccggtagctctgagaggaaggagggactgctgagcagatggaaggggcggggcctcctaagcgacggtcccccaaagccagggcacaggtggggagcccagacgtttgccgtaggcctctaggaccagcctggctctcacctgggtgtaggccagtacgtaggtgggcgagccgtcgaacaggaagaggctgttgtgggtgggggctgggctctgctgggcctgcagctgggagcacatttcaaaggccacgcaggccccgtaggagtagccggccacgcggtaggggccctcgggctgcacctgcctgatgcagtcgatgtagtaggcagccaggctgtggatgctgtcaaggggcgcagctgcaatggcagtgccgggcactcagcatgtgcaggcggcagccacgggccccgtgatggccagcactgaccaccgcttccagaggagggcccgggagtacctcgggtgcactgcaggccataggtggggatgctgagccgggaggccaggctgtggaacacggtggtggagccctcgattgggtgcaccaggaacaggggccgctccgagctctgcacggagttgagccgcatcagggtggggccctccgggttcaccagcagggagcgcaggttcagctgagtctgctgctgggccagaccatcctccttgggcgtggggcatgccagctctgtgaagacaggggcagatgccaggctggtctgggtgcagagccctggcacccacgcaaggacacacagacacgcacgcaggtccccacggtgctacgtcaggtgggagtcggggtgggaacgctcagaatggcacccgtgacgaagggcggtatgcctgccgggacacggtccagacaacaaggaggaagggctggggaggcccggggaccccactcccgcctggccacccacacgcaccgctggcctcatccgcctttgaggacagctcctgcagtttccggagcgtgagttgccgcacctcgcgcacggacagcaccaggttgagctcacgctccagcgtctggcgcacctccacgctcatgagcgagtccaggcccaggtccgccagtgagctgtccaggttgacagcagccaagtcgcggatgcctggaagggatgcgccgggtcggcaactccagagggggcatggggacggcctgtatgcggcagggctgacacccaggggtgcgtgggctgtgcatctcccaaagcaccaccaccacagtgacacctgcgcccgcaccctggctctgcagatggggaaactgaggcgcacaggggcacgactgctatgtcccaagaccctgatgccagcaggggaaacacctggcgcggctcctactgggagtgctcacccaggatgtgtgccacggcctccaccaggtcccgctggctgtccctgtccctataggccgcagccttctcagccagcacaaagctgctcaggaccatgtggggctggttcaggaagaggtccagcacctccaggcaggacgccatgcgctggggcagcgtgccactgacgatcgtgtcgttggtgctcatcgtctccaccaaaatgcccacgtcgccgatggcgccccactgcacggccaggcctgtgggggagggggcaggtgggcagagctgcggggaggtcggggtggggagtggccactgggagagggtggggtgggcagggctgcggggagaaggtgggggtggggagtggccactgggagagggcagggtgggcagggtcgaggggagagggtggggcccacctgggaggccttcgtgccggcgtttctcacagatacgctccatggcggaattggcaaagccgtagttgctctgtcccgcattgccacgcccgcagctcacagaggagaagaccacaaagtagtccagctcagggcacgcctctcgggtcaccctgtgggcacgcgtgtcactccccattggccagcatccccaggagcccccaacgtcccatccccaggaaacgccagagagggctgtcaacaaaccaccttggctcccacggccctgagcccagagcccggcagaggcgggagcagggctgtgcggtacccacctgtccaggttcagggtgccgctgtacttgggcttgcagacgtcctggaagaactctggggtctggttctccagcaagccatctctcaagacctgggggaggcatcctcagcactccctgcagctccagggcctcacccgtccacccagggtcccccccttggtcttggggcttttgagggccccatttggggccttccctcaccacggccaggttgaagacgccgcccacgggcccaagctgcgccgcctcggcaatgaggccccgggccccctccagtgagctgatgttgctggtggacacctgcacctgtacgccctggcgcctccaccggcggacctgcttggcctggtagcctgcgggacacaggactgtgggctggactgggccagggtacggtctcttccctacacgccgggctggggaagtggggagcagccgcagagccccatccagcaagccccccacaagatggagggggacagaccccaggcaccgtgacagcccacaatggtgggctgcagagaagggctcaggggcccggggctgtgcctggcccaggctggtccacaagcacccctgccgactcacctgtccggatcccggagcgagaagtcaacacgagcttctgcaccccacgctgtatcagccactgcgccaactccaggccgaagccacccagaccaccagcgatgatgtagctcttgtgggccgggcagaaggtcttggagatggccgacatcagcttgggtttggcccccttcagcactgcctccggctcctccgcaagcacctgcgtccaagcagcacccaccggctcaggcactgcctggggaccagagcctggggtgcccgaggcgccgggactcctcccctcacctgcacgacgactttgccaatgtgcttcccttgggccatgtagcggaaggcgtcctccacctgggccccatggaacaccgtgcacttgaggggccgtaccaccccatcccggatgccggcctgcacaagcgcccacacctcccgccagtcagcactgctctcgttgaagaacgcatccagtaggaccccgtggaatgtcacgttcttcaggaagatagccatgcctgcgggcaggggccgtgctcacccagggccttccacaggtccacccacacccatccatgcccacccccgcccaggcgctgccggcctcaccgagcgggtggttctgagaaaggtcgaatttgccaatttccaggaagcgaccgtgcgtagccaagcacctcacgctggcctgcagcttctcttccgccaaggagttcaagaccaggtcaacgcctagggggccagaggggccagacaatcacacccactgcaagcccagccaccacagtccagagggccagaccctgcttctccctgggccggaggctaggcaggaggcaggtgggggctgtgggggccactcacccttcccgcccgtgtgccacagcacatgctgctcgaaggatgtgtcccgggagttggcgaagctggtgctgtcgagctgggggaacctggcctggaggtacgcccgcttctcagccgaccctggtgaagagaggaagcgcggctggtgagccagggcggcggggccaggagggcagcgggaggcaccgggggcggggccttacccacggtggtgaagacgcggcagcccagactgagggcgatggcgatggcggcctggcccacgccgcccgagcccgagtggatgagcagcgtctccccggggcgcacccgcccacgcaccaccagcgcgtagtaggccgtgctgtagacgacaggcaccgaggccgcctcctccagcgtcctggggatgcagcaggtgggtcagcacaggcctggccgccatccacgtggggcccaggctcacaccctcgacacactcaccagttggaaggcacatcccagaggaagtccggtgacagcaggacagaggtggccaggcccttggcaggcaccagtcccatcacacgcttgccgctggcgtctcggcccgagaactccatacctagcaggctgtcctgggaggtccacttccctgggggagacggcactgagcccctcaccgcctgcccttccctcccgaggggctcccaggcaggtcctagctgctggggtctctgctccccggcccagtccactcccacggccccatgccacccatacctgggatggcatcaggggacagcttgccagtggccagcatgatgtcgcggaagttgagggaggcgtagtagaccgtgcagagctgggcgccagggcaggtgggctgggcatggcgcagcgaggagcagacccagcggatggaggacaggtccccccgggtgagggtgctcacaaaggcatgtgccgtcggctcctcaggcttgtctagggaaacagggaggtggggctgctgcggggccttcgggtgcagtctcccgggaggggcagggcagtgtcgggggctcaccctcctccagcaggaagtggcggaaagccccccaggccccgtcgcggtagacgttcatcaccaggtctccctgcaacaccttctgcagttctgcggagcccgggtccacctccgggacgtgggaggtgctgctgaggttggagagcagcacacacctgggggcagaggcggggagctcaggctggggatggggaggctggtggggaaggggaagtggtgaggggccgtgctcctaccggaggcggttcccgccgggctctcggcggagacagttcaccaagcccaccacgcccgaggtggcacagttgatggccttcagccacacaggccgggaagagtcttcgtcagccaggatgccctacagcgggtcggggagggtcaggccacactcggcaagttgggaggtggggtggggcctggaggtggggcagggcctgaccttcagagactccacccagcggaagctggtatcgtccaccggcaggaagatggggctgtcctgcggggtgggccggcggcacaggaagagcgtggagccgtagaaggacttcttcaggcccaccaggcgcagcgacaccctggagaagaggctctcccacgcgtcctgtgggggcggtggtcagcaccctgcccgcctggccctcacccggcccccaccctgtccccctgcccggcggccgcacctggctcaggatgccctggccatactgcggctcagtggaggtgaggaaggccacgatgtccccgagggggtgcccccggagcagtgtgtgcaggagcagaaagcccccttctctcagggcagccaccatgttgctgagagctgaggccgggtccccgagggcagccacagcacagttgcacaccaggaggtcggcgctgcccagggcgctgggggcagggtctgcgggatcccactggccctgggcaacgtcgtgctgctgcagctcggcctgggcagcctccagggcctgggggtggcggtcggtggccgtgtagctcagctgcagcaggggatgggggctgagcaggcctgggatgcgggaatacaggtgaccgtggccagccagcacctgtagggggtgaattctggaatcagccccacaccaggcaggtgcccctgacctggggctgggcaaaatgtccatgaggcctcagtctggcagaaaggcttccccgtcaacctgatgacggtgccagccatgggcacgcatggatgccactggtcttgtccctggggtcctgcctaggctgcacctcttggagcccacgggcggaccctccacggtggctgtgtggaccgcacaggacacgtgcacagaaccacacagggaactggccggccccacccaccgcccagggcccgccccgtgtctgtgctgtctcctgcaactgatgtcagggtgggtcctaccatgtccggggcagaggcctggctgcccaggaggcacccacctccaccaccttcatcttcaggctgggcatgttctccacggcagtgtccaggcaggccttgagtgccggggagtccaggaggccgctgagcagagggtcctctggcagcttgggcctctcctgggccagcacctgcgccagctccagctgcaggttcccgttgagctgaagcctgcaggcagccgacaacagccggggcagttcctgctgtgaggggtcccgggggatctgggccccatccagtccgggcaccaccatcttcagcccctgctgggtcaccttggtctgcagtgcctgcaccagccctggggagggagggaggcaggcctggtgttcccaaagccccagggcatctgcctggcatgggctctcagacccactctgtccttctggggccaccaccccgctctgcccacaggatgagaaatagctgagggttgaggaaggggctgcccaccactgggaggctgactcctgcccactgtggacgcagtgaggggccgcattcagctgcaggggctactctgtgcctagccaaggtgtgaccttaggctgaatctgtcatctttgcccccaagtaccctttcaagactgaggaacagtgaccagggacgaggaaggctgggggctgggggagggagggaggccgccatcgtgagctccggccggagggttgggctagggttgctgaccccaaagggggccccgtggagaagcaagtctggggtcaacgtgaggggaggcgatcgctcctcatcgccagaggtgtccgaagccagcagggctgggacctcacccttgcacagttgcagctcctcctgcagggcagcgcgctcagacaggcacccctcctccgtgtggggagtgaagcaaaacttctccaggatgggcacctgctgctcctgctgccgccgcggggccgactcagtgtggagcccggagatgtggacgcctccggccactgtgaccctcagccacctgctcaccaccacgtcagccactgtggggacaggctgggtgagtgcggcatacttgggtgggggcactgggctggggctggggcggggctaccttgggccttgtcctgcagtgtgtacagcttctgcctgtgggtggcagggtcgatgtggatggcggtgacacgggtgggcaggtacaggccgtgcttggccgagcccaggatggacatctgcagcatggtgtccatgaagctcacccagttatccttccacagcagcctccccgagtcacctgcacacagggcctggttggtgctgtggaactcccaggtccctggggccacctcccagagcccaccgggcccctctgctccctcccaagctgcatgcctagctgtgggtgccctctgtggtccccacaatgacgaccgccctccccggtggcttgggcagcagtgtagtcagtacccaccttccaggctggcctccaggatgccctggaaatgagggccgtagtcgtagccacgcagacgcagctccttgtaaacttcagcctgggccaggaagaggggctccgtggggttgggggtggggctttccgggtggtcgaagagcctggggtcagggtcatcccactggtacaccttccctgtggaaagggaggtgcggaagggcctgaggacgggcggcatggccagcgggcacagcctccgcagctcccgtgccaccggccctgcttaccactcactaccaggttgccgttctctgacacctcgaaggcacgggaggcctccaggagccgtacctccagggacactgtccctgcagagcgggagagttggagatcagagggcagcacccgccccccagctacccccgccttggtcctggggtacccctcaccagtcttgggcaggatggtggcctggtgcagcaccacatcctcaaacaccacaggcagctgctcgacgcccaggcccagggcgcgggccagcgtcttccacactatgctcaggtagccagtggcggggaagaggacgcgaccgtcgagggtgtggtccaccaggtagtggtcaggagactcggagctggtgtctgcgggagggcacaggcctcagcacagagcgggcgtctgtggggagggaagagtctgcccacccgccgggcccctgctcaccgatgttgtagatggcggctgagggggaacctgaaccgttggggaagtcctcggcggccggcacgtcccaggccaggctgtggtcccacttgatgagtggggagatgaggggagttcctcggggagctgggaactccacaggtgggaacaaggcattggggttggcgtcgatgctacggagaagggaggcatgggtagcacacccgtcaccggggtccaggggctctgggttcagcccacccactgcctgcggtggaccatccagggctgctgccaccggcctgggtcagtgaggggcccgcagccccgctcacccaccccacgccgtccccgactccgggagacgagacccgggctgggaagggacccaccctgagaggtgcagcctgccgatgccggccaggaagaactccaggttgtccctgtgatccttcttcatcagggggatgatggtgcagctcggcttcaggccacgcttcaggacagcctgggggcggcagggcaggtgggctctcttggtgctcagctgaggcgcccatcccaggctcccggcgcctgctgcccccaggctgggcctacctgcagcagggcgtggggcgcgatctccagcaccaccgcgtgctcaggcacgtgccacagggcctcctggaacagcacagggctcaccaggttgttgacattgtactcggcggaggacgtgcgtgccaggctgctgtgccactgggcctcggggatagaggtgctgagccagcgggctgaacgtggcttcggctcccggatcacctgcatgaggggccaggtcagtgctgggttgtgggtcccctggcccgccccgcaccccccaggccgtattagtccaccttcttgagctcctgcagcagtgggggtgcgatggcctccatgaagtaggagtggaaggccataccgccggtccgcacctccttggcaaacacaccctccttcctcagctgctccacgaactcaaacaccggggcctggacatcgtgggagcctggataagcatcctggctgggcacccacctcaggctcggagaggtagggcgcacccacctcaccccaagggaaccgagagggaatgggcaagggacctgaggacaaacctgccccatgccccaggcccgtcagagcttggtggggcgtagaccgtggccgcgtgtccctgccagacttgcaatggcaggcgcaggggacagaggagcccgcccaggccgcagcacccacctgaggtcccgagatggtgactgtgtccttggagttgtggcaggcgggcaccacgcccggggggcagcgctgtttacactcctcccaggacaagcctatggcagagccagcctcagaggcttagcgtggacaccgagccgctcccagccacccacccacccagacactgcctgcagctgggggcagtaatgacaagtgtggtaatggcagccttggagccttcatgagaaaggttcgccccctgctgtgtttgacccgtgggtggaggtgtcattacagagctgccactccaggggcagctcctgggagcccagtccccagatggtggccccctcagtcctctgcagccaaggttctttccaggtcctgcccacatgtggcccatggggctcagagatgggtgccaacagagggcaccagtctgagggaaccctgatgacccgtgtgttggcttcaccagagcccctgggttcttgctatgctgcagctgtgtgctcatcacacgggggctccacgcaggcctgatgcccatggacacgtgcctaggcccaaggctgccaggtgtggggccagtggggcagctgcaggggactcgcgcacggctgtgtccgagctgggtgtccccgggccagcgggggccactctatcctacgggggccaggccagggctgcaggtgaggaccccacagcgagaaggcagcctcctttcttggaggtgctgggggcccctccgggagacctacccacggctgccatggcgcccggcgggagatgggcttctttgatgcactgtcccctccagtaggcagcgaggacggcctcctcctgggacaggcagccgtcggcgtagccacaggccacctcccccagggagtggccgacgatgccatctggcctcagccccatgcagctcagcaggtctatgaggcctatctggggtgggaacaggacactcaggttgcaacctccagcaggtgcagctgttgggggcggcccccggccccactaggccatctccacccccgcgccccatcgaccctcccaggtctcctgataggaaagaagcccctatggcccccacacagccccactgagacccctcctcccctcccgtcctgcccccagcacaaggctctgcctagcaaaggggctgtcaggggccccggactcaacactgcagctcctgggctccagggaaagccagagccctggggctggcgttgctcacacgctggcaggctgggccctacctggatggcagtcaggctcacaaacgaatggacgatgtcatcaaaggtgctctcgtctgtgctcagcagcagctgtgacaccttcaggccgaatggcttcacagcctcatcggagcgtaggatggaatctcggaagcggtccaggcgcatgaggctcagccccatcccgcgccactgtgtgcccatccctgtcccagagagcacgtcacgaggctcagccccatcccgtgccactgtgtgcccatccccgtcccagagagcacctcaggggaccaccagctccagttcgcctgcctttccccagggaagggaccaccttgggggcagagtgtgggctcaccagagcagatgaaccagagcgggcgctcgccagcgggcacctgctgcacctctgggccaccgcgctcaccacccagcacagcgtagccacggaagggcatggcggtggcggggacagccgcgatgtcgttcagcatgctcaggaaagccaggtcctggctgtgccggaggccctgctccagcagcttctgcacggcctcaggggtgcgtccgctggcccgcagcagacggggcagggtggcatgtggggcgggtgcggggggcggctgcgtgttgggcctcaggatgatgtgcacgttggagcccccgaagccaaaggagttgatgcccacgttgccgccacggacgggcaggggctggtccaccacctgcagccgcccatccaacagcgctgggatctcagggttggggctatggaagtgcaggttgggggcccagagcccgtgctccagggacagcagcacctgcgggggtacgtggtggatgggcagccgccccactccctctaccactgcctgagctgggggcaggcacctccccgagactctcatgtggggccagggttccagggccctctccgatgcacttcctgtccccaacctaattctgccatggcacaggggtccgaggactgagccgccatggccctgccctcagcttggtccaagacctccccttccggccttgctgcctcccagcctgatgtggacccaccaaagcctggctgtggcctgaacactaaggcccccttggcccagatgttgcatctcagaggctgcagaagttggggggcagagggcgtgagtgatcatgggtgttggggctcctgtgcctggtctctctaaaggtccccaggcctctgctagtgggtcaggaagctgtagggacgggtgggcgacacgggagaccctgatggtgccgtggacccccccaggcctgctcctgcctcgctcttcccacccaagcggctcctccagctcggctccgtgtccggcagacgctctgcagggcatcaggcctccagggaaggcccagcgagcctggctacgagctctccctgctgtcagcctcagtgcctctgctcagacctgcagcatagcccgggggacagaggctcctggtggggaagcccccgcctccacttggcaaagagaaagcagcagtgcccagccatggcgcaacccagtcccagggagcaggagcctgagggacccccaagcccagccccacctaccttggccagggctgccagccccgaggctggctccgggtgccccatgttggacttggtggagccgatgagcagcggctcctggcgggtggcgcacagggctcgggtgatgccattcagctcctgggggtcgcccacctgtgggaaacatggggggtgaggggctctggccaggtcacctctccaggcatgggcgtaggttaggctcatggggtggtgagtggggcggggggggggggcatcaccttggtgcctgtgccgtgggcttcgatgtattcaaatgactcaggggccactccggccgactggtacaacgagcggatgagctgctcctggatatcccctgaggggaaggtcacgcctgcggagggctcggctcagtgctgcagccccagccccggctcccacctgccccccagcaccccggaaccccggcagagcccaccttgctccttgaagccatctgtattggtgccggcgttcaggatggtggcgtacacccgccgggccagggacttcttggtcagcaggacggccaccacaccctccgagcggcagtacccattccctgggtagagcagcacctcaggcccggggctcagccccacgccggcccccaccccaccaggaggagctctggggtgtggggtgggtgcttgggtgggggatccccggagctggcaggatcctgctcagcgtggggactgtgcggggggccgtcctgtgccactgtcccgcctgccctggccgcgcagccgcacactcacccgctgtgtcgaaggccttgcaggtgccctcggggctgagcatccccagcctcaagaactgcacggaggtgttgggcttcagcaggacattgatgccccccacgatggcggcagggcactgcccgctgtggatggcctggtaggcgttctgcagggccatcaggctggaggagcaggctgtgtccagtgcgatgctgggccctgcaaggaagggtgctgcggctcaggtggggctgtgagcacacgagacccctgagcacacctcctgccaccaggctggacacacactgcacggagtgagcccacgccacgtggtttctgctcagcatgtggggacctgaaggccacccacctccgcaggaggctgggcaggacccacctctgaagtcgaagaagaaggagagccggttggccatcatcgctcgctggcagcccaccatgctgtagcccacgagtgtctcggggtctcggctcagggcctccgaggtctcagagccgctcacgcccacccagacgccagtgtgtgttcctcggagtgaatctgggttgatgcctgccacaaacagtggtcaaggtgccacggccgggccccacagcgcagccagcccacccacccacccggctctggggcgaaggtcccatcttggcctcactggcttggggtgagggggggtccatcccagtgggaccctggaaggggcctaaggagggtgaggtgtcctgcagaggggccagaacagagcctgtggccagcagccagcccaggtgaggcctggaacaggaaccaggtcacagagggaacgaggcggagggggcaggcgggcccaggggagggcaccaggcacggccagagtggctccaggaaggacagagggcagcattgtccccaggcgacgcctttggcccctggtgtcaccggcagctctgatgagcccgtcggccagtggcctctccagcgccaagggcagcctgcaccagaacaggccgtgataaggaaccgaggagacaaaggccaagtgtccaggctcgggaaggagagagggacaccggtcacccccggggagcataaccttagtcttggggtggggtctggcagcaggaagggcgcaggagaagggcttccacctctcggccagcagggcccctcctcgcccctggtgggctggctctgccctagggtgggtgggtgtgtgaaccgctcacacccaagggcagcccagggctcagcctccccctcaggaggtccttctccgcccggggagggagcacctggatcttaagaaatggcatggctgggcgtggtggctcatgcctgtaatcccagcactttgggaagctgagatggatggatcacgaggtcaagagatcgagaccatcctggcaaacatggtgaaaccccatctctactaaaaatacaaaaattagccgggcgtggtggtgggcgcctgtagtcccggccactcaggagactgaggcaggagaatggtgtgaacccaggaggcagagcttgcagtgagctgagatcgcgccactgcactccaacctggtgacagagtgagactccgtcttaaaaataaataaataaataaaaataaaaataaaaaaacggcgtggcgcttgtccgaggtcaaatgccagtcagagcgagggccaggctggcgggagagggttgaaatgcctggggtggggggacgtgggcaagggtagtggggagggtgggaggggagagacagcagggccggtgctgtccgctgcttggctggtgggggtgggggcctggagggcccctcaagaacctcctgctttgcctctcgtcactccagccccggccccggccccagcaccagccagacatcagaagcgaggagactggtacgctcaggtcagggcacacccgcgacacctctggggtgcagttgggaaactgcggcctaccccgtggcccacacctccctgagcccgttggccaggccaggggcacagccggggagggtaggtggtgccagcacctggttctaccagaaccaagaagagaaaacactgcctattccacgtgagcagcaggagccctcggcgcagcagtcgcgaatgcccgacccacctccgtccacgatggcttcataggtgacttccagcagcagccgcagctgagggtccatcgtgtgtgcctgcttggggtggactccgaagaaggaggcatcaaacctagacaggtccttcagcttgccggaccgccggggcaggccgtagagccctgtgggacaggcgggtgtttaaatctctgacggaagctgcccagaggtgggggccctgtggggtgctgcaggcccctggaggggccatggtggaactgaggactctctgctatgcctgggaggcccaaacaatggagcaggctccccaggaggggaagaccatggccccaaagcggggactggtacgaccagatctgctgcacaagccccaagccccaagccccaatcctgagatgggccgcagagcagagagctcggcgggagtgaggctgggggaccatctgccgggctggtgcctcggctctaccatgctgactcacagcttgcctgtcaggtagagctgctctgtggaagagcctactgggtgtggggcagttgctccagcctcccggagcacatctggtatgcaacctcccagctcaggacagacacaggcaggggcagcctggccggaagggctctggccccccgcaccccctgcatgggtgagagaccccagcccgtcacccatcctctgagcttggctcctccgtaacaagcagatgggccctgcctgggccagccctcggccttgcagccattgggggagcctcctgttggccttgcagccgttgagggaacctcctggcaggctgggcgcattttctaggccactctggtgcaatgtccaggaaggaggctgcagctaggcctcgcccatgggtgaccagtggctctgcagctgggaccggcctcaggccagtgcctgggtggtgaggacacagcacagcagggaggctgctgtgaggacaaaggtggagatggagcttcacaccccaggcacggggagccccgcagccacatacccgccttccagcgacggtcatcgtccgtgaccatgtccacaccgccgatgaggttgtcccagaactcctgcaagttctccgactctggcagcttcccggacatgccggcaatcaccacctcctccatggctgctctgcagggcgggcggtgtgagtgccccacacatcccggccacgacacccccgtcaacagcctcggcacccagaacaggtggacacccatggggccaagcaccaccctgagggtccgtgcgggccctggctcctgcggctcccttcctcatgtggccagttcctgggccctgaccccgctctcgctgggaggggctgcgtgctctgggaacaggcccgcctctgggccctgacccattcagttcagggtattggctggggtaccccactggagccctgcagccctggcctccccagcagttactggtttctgcgcctgtgtcggcttccactcgcctgagtctcagccttccaaggctcctggagcttgtcccaggccatccctagggcaccagggggctcacagtgaggagcaggcagggtcacctgagatggggacaaggcctcaggtggccagcctgctaagggccatcaaagaaatggagaggcagggtcccaaagccggggcatggaggtggctgggagccctagaggggggtactcagcacccatgctcacccgtgttggggtgggggcccgctgtccaggccagcccaagagccaccagggctggggagggacgaaatggggatagcctatgctctgggggaaaggtggcccctgccccactgtggaccgacccagccagtccaacccctccagcagggtccaacctggagaaccactcctggccaggacacgcaggtgttgcctggcacccttcacctgcgcgggtgaacccacagacgcttgcctccccataccaacccacacaccacaggaggccctccctggagcccaggtccctaagacccggaacgggtgcccaggccgccggctcctcctccagcatgagggctggtgcggccctggggggagggggcggaggccagcgctggtctggccacttgcacgaggccccagggcctgatacgcgcgccgcccctcggcagtgcggcctcccttgggccgtcccggcagggaggcggccgccttcccacccgctgcgattcacagaggcttggctgccccgggccagctccaggcccgcacgctgggtcctcgccgcttgctattcacgcggggtcgacggccaggcagggggtgggaacaccgcggcgcgcccggcctcccttcgccccgggcgggggctgctcgggacccctgcgcttcggccgggctgcgccacgtgatggggaggccggtcccggcgcggcccctgcgcccccccgttcctccctcgcggcgtccccttcgggctgggcctcggctccggggcggctccgggaggaggatgcggcggcgcctttgtgggcgcggggaggccgagccgggggctcctccaggcccttcagggtccgcggcctcccccacgggaagcgaaggcggctgttggtggctttccccggcgtccttcccccgccatccgcccacctactccgcggggccccgggcgcctccgaaggggcacgaacaccgagacccggacaggccgcccaggcgacccctggatacggggccgggccacgcgcgccccgagagcggaggatgaggagccgggccaccccgggaaccccgggcccagccccgaccacgacccgcgccccggccccagcgccggctgctcgtacctggtgagggcgcgggcggcggtgcgggcggcggagagcgaggctggagcgcggcggagcgggaggctgaagcgcggcggagagggaggccggggccgctgccgtctctctggctccctctaggccggcgccgacgctatttaaaccgcggccatccccgggcggccacgccacatgggctgacagcttggctgcgccgcccaggccaatgagcgtcggggctgcgccccgggacccggcgcgccgccgccggtggggtgatgctcgtgcgcgccgccgcccgagccgggaccctgcgcgggaacgcgcctgggggggtggggctgggactgaggagcgccgggggcggggcgggcgggaaaccaccgccccccgacttccgcctcccgccccgcgggccccgacgcgcacgcggctgcgaccgagcccgcggcgcgcctcccgagccatccccgacccccgtgtccgccggggccacgtgtgcgggatgggaatgcttgggccacactggggactaccccgtggccacaccgggggtccagccggctgcggcggggcgctcggacccacaggcgcgcggaaggacggacggacccgcgtgcccgcacttcggccgccgactccacgccgccgtcgctgcccgcgcggagctggctgagggcgcggcgttgcgcggcgcggcggcagcagcaaccaatcgggcgccaggggtgttcgcaccggcccaatggcggcgcgcgggtgggcgttgctaggcgatagggtgatgggcgggcggcggggcggtcccggatgcctcgcgggccgcggcgcaagtgcgggcgttgaccccggccgcgggcgccccggccggggttactgccggtcatcgcagcgcatccccggttttcctcgcgggtgcggcggggaacccagacccgagacggacgtccacccacccgacggcccctccttagcagcttcccggggacccggacgaggcgcagggccgaacgggcgagcgcactccaggccgctggagctcggcggaggggaggggcgcggccacgtggcgagcggagtcggccgggacacccacctggtgtggtgcggacaaagggagccgctgccccacttcccagggcggaggctgcgagttttccaggcgcgcacccacgggcgggggctcagcccggccctcgcgcgctccctccctcccgagtgattcctcgaatcgtggccccttgggcggcctgagccctgaagcgcggcctcccttttctgaccgcttcgcgcttgcggggccaggcaccccatggggggcaagcgggccttgtgaggccacaggtgtctctggctgcgtgtcctactttgagggctcagcaagcccgggccgctgaaggggaaccggagactggggcccccggcccctctgcaggtgtcccgcttccttcctctcctgagagcaggcctgagggtcaggcggccactccgcgtcttttcccttctggggctgtggttgacgcacggtgggaccgagggtcaaggaaggacaagggaagacagggccggggctggccccgcactgctgtccccactgcgggggttcttctgattcagggtgaggccctgtgtcagcctcaggcgtgcgggcacgcagctccggctctccatgctccaaacctcccaggtggccctggctgccagtgctggtgatcagcggccagcggggccctgctctctgcagcctgtcgagggctgggccagctacaggggagccctggctggctcccaaggaggttggagactcgtccagcaccctgagggcttccacagaaagtgagcggcagcggccgggcttggtggctcacgcctgtaatcccagcactttgggaggccaaggcgggcaaatcacgaggtcaagagttgtagacaagcctgggaaacagggaaactccgtctctactaaaaatacaaacattagccgggtgtggtggcgcgtgcctctagtcccagctactcgggaggctgaggctggagaatagcttgaacccaggaggcagaggttgcagtgagccgagattgcaccactgcattccagcctgggcgacagagcaagactctgtctcaaaaaaagaaacaaacaaaaaaacctcacagggccgtgactcgattccaggggacatgtgtgggagaccacagagcactgagagcctccagcccatccccaactccgtctggattcccatggagcaagtgacggaggctaacctcaaacgcccctgccctggggccacagcctttgtctgtgtggtgtggtctctgcttgtcacggttatccggcccgcacacctgtgagctaggccagccgatggcactgtctatattttacactgggggtgcaaaccaaagctgcaaaggtcccacgatttgccaaggtggcacggcaggttagggctgggagcagcgttctcccatcgtgttcccagagaagctgtctgcccagttcagaaaggtggcccgagggtatatggcaaggcccgtcaattcacccagctgggtaccggctgcctccacccctgcactctgctgtgggcagagtgtgaccaggcctggggggtgcgggggacagagactgggctcctgaggagtgggggtgggatatgaaccccccccagtcaccatcctgccggtcgcagagcactgcgtccgtgtgatgaacccccaccccagtcaccgtcctgtcggttgcagagcactgcgtccgtgtgatgaaccacccccagtcaccctcctgccggtcgcagagcattgtgttcgtgtggaggacacgcgaggactcttggaagtgctttttggcggggtagtgcagtgtgttccgggcggacgggcgtcagtttacgtgtgcgtttctcatccttgcaggtacctggccccgggcactcaggtggcagggacattttgctgttatccttcgtgggggtggacgtggaaggcccagcagtgaccgctgtccccggttggcccccaccctgccagcacctgacatgcacaccccaacctgcatgaggcccaggtgcccacctggcttccaggggtcaccttggcccggttcactgggatccaaggctctcactccttctgggagggcccctcccatggtactctcaggagacgcctgctttgtgggtgggctttctgatctgccccctacctgctaccaggctctgaggaaggccacactgtccccaacaccactggtgtgcagatggctgtgggtggtgacacgggcaggccaggctctggcacaggcacttgatactgcatttcccaagtaggacagataaacaacgctaaggccaagcagacgccccagggaggaacctggttttaatgggccctgtgctcagggaggccttcagtcagcagggtcgcctcagcagcatttgggagcctgccctgcagctccctgcctccaccctgcacgctgtgcccacacccccccacaacacgtaggtgaaagcacaggcaccatgcggaggccccgagcaccccttagtggggcggggtggggggaggaagtcagtccataatgttgtagttacggatcttggggggcctctggcagcctttagcttttgcaggatgagaccgggaggctcctgtggtcttggcctttgcctgggctgctgtcttcatccctggggtggcaatgcctgcctgcatcttgacgggcctcctgtcggctgctggaggagctgggagctctgtcaggtaaagaggaaaaaacagcatgcatcaggatggcagggggagcaggaggctgtgctcacaggcactgcacaggtgcagcacttccgtgttcccggccagcgggggccctgtgacccttggcctggctttcctccaggagtccgtgaaggccaaaggatcctggagtgaccagagagctgtggcctcgccttgctcagtgggtcctgcttggcagggactgggcctgcccctccactgggcacctggacatgtggctctgaaaatggtcctgttgtgaccatttcgtaatgggtcccaggagggggcaggggtgctgtgtggtaatgggtcccaggagggggcaggggtgctggggtaaatggttgactcaaagctcctccccccaggctgccccgggtgtccctaccatctgagacacattgcctgcccccgcctccccgatgggccagcagtgccaggcttttgaggccaaaggaaaggccgtgctggtgggcaccacgtggccaggcacaggccaagggcccaggagtgcgctacacacagaggctggggcctaaatgccagatagcccttcctaaacatcggctaaaaccatcttcgcagaggggtgttgtaggtgatcttctttatctggccagtttttctctatttttcattttttcaattaagaatgtgggggttttttttggtaaaacaacagcaaaatgttactaaaaatccatgcaagggctgggcttggtggctcacgtctgtaatcccagcactttgggaggccgaggtgggtggatcacctcatgtcaggagttcaagactagcctggccaacaatggtgaaacgccgtctctactaaaaatacaaaaaattagccgggcacggtggcgggcacctgtaatcccagctacttaggaggctgaggcagcggagtcgcttgaacccgggaggcagaggttgcagtgagccgagattgcgccactgcactccagcctgggcggacaagggcaaactctatctcaaaaaaaaaaaaaacaaaaaaaaccccacagtaagatgtgagctcagcgtccactgcgtggccacactgtggctggggtgaggtctagaggactccagcacgtggctgaatgtggcccagtgggcagtctggacaggctgacccaggcaggtcagcgggcggccaacgcctcctgctggagcccagcctgtgtggtctgcgtgcagcctgggtgactgggaagcgtctgtgctttggggacaccggcaatgacgcactctcagctgggctgcgcagtgcccatgggggcagccacacactcccagccctggccctgggcccctcttcccatctcagcttcttccactccgatccactcttggggtctcaagacacccggaaccagtcttccttttcctgcagccccgttggggtcacacagtccctggccccctgctggggtcctggggggccctggacgctgcctgctccctttgtttccaacccccagaggaattcctcctcttcacacaaaggctaccaccctttatctctcaacaataagcctgcctgacctcctggtcccggccaacgcccccatccccactccctccccccaccccccacactggctggcagagggtggggtatcccgtggaaagggcttcctgcggggaagctggtcctctgaccaggccctagtgctccactgtgaccctgaggcatctcctcaaacccagaggccttggttgtccctctgtaatgctcagggattctgggggctttgcccggcttgatcctcctcagacaaagcctgtggggattttcagaaaaagtgagctgagggaggggggtgaagggcctgcccctttgcctgggaggcctgagctggccctgctgggaggaccctggctgtatcccggggcgaagcagggaggtgtgagtgggtcacagtccccggggcagggaggggcagggaggggcagggagggtgagctggccccctccccagggcaggccggcccctagctcagaatatccactttacaggctctggtttcttcactggtccttttcctgcggagccctcctcagtgatggtggcagggaactggccatgagcccaggaccccagggcagcggacagccccagcccagccagtcctaggtcagaggcacggagctggatgtgtcaaggcggctgccccaggcgtgactccctgtgaccccggattcttctacctgatgctaatctgaggtcaacccagtaactggtgtgtaaaaacgctcttggcctccaccactctctgccccgccttctcgcctgacctgttttgccgagcctggccgggatttctctttctgcgttgggctgactgggccgcagggaaaccatgtggacacacagtttgccgggcacagcgtgaggaacgcgcctcttgggtcctgcacccctcccccacgggctgcttgtgctctggccccgaactgagcttctggaaagttcctgaaacatccaaggccttgcagtgattaaccaggggagggggactggggcctgcttgcccctcccaggcttaacccctcccaggtcctggtgtgtgctgaggcagggccacccaggctgggctccgtcccctcaggcggctgcaccatacttggagggttttttaaatttttatttttatttttgagacggagtctcactctgtcgcccaggctggagtgcagtggcgtgatctcagctcactgcaagctccgcctcccgggttcacgccattctcctgcctcagcctcccgagtagatgggactacaggcgcccgccaccacgccccgctaagttttttgtatttttaatagagacggggtttcaccatgttaaccaggatggtctcgatctcctgacctcgtgatccacccacctcggcctcccaaagtgctgggattacaggtgtgggccaccaagcccggcttggaggtttgaagctggtggaatctcagggaggacatagcctgtcctattgcagggaaggtgcggccctcactcccgtctcagcctgggggcatgagaactctgagcacaaagaggacggagctggtccccagctttctggccaccctgtgagtttcttctcctgcacctgagcctcagctcagctcttgaccaagttggcctctggtggctcattctccaggctgctccgggctctctgggtgcccctgggcacacctacgtggcttcctagggctttgggaagggccagacggtgagcccacgccttccctggttctccagagcctgccttggggctggggagggcctggccctgatggcagctcaggcctcaagtccattctgtggcacagaggcccttccgtctccctgtggcctccgctgctctgtgtggttcacccctgctgtgtcaagggcccttgttctgctgaaccccctctggctgccacaggggtcctcacgcacccaagatcaacccttctcaaatgcatctagttatttccaagtctcttgggaacaaggcttttcccaccactgtcagcacggcacccaggcctttagtgcagacggtgacagtgaatgtgacttgactccccccaccccgaatctccagaagctgcgtgcacctttccagggtccccacgcctgggaggctcacaggccacgcccacccgtgtctccccagcctgcgtcaaccctcacctgctaaagtctcctaatggacacccccacccctgagctcctggagctcagccctggggggtcaccgtggccccggggctgcctttgtgggactgagtgtgacaacaggagagcaatggggtacagggggagggaggcccacgtgatctggttcccacggtccctccacagggggacactccgggcctgctatgtccagctgccttccccacctcactggcacatggagcctggagcccccactgggcagatgcacaagaggggagggtactggacattgcatgctccagggctctgggcagtcctgccacccatcactcagcctggtgaggcagggccagcaggaaaccccagatccttcaggccccgcctgctggcctttggagcagaggagaggtgggccctcgggggcctgggcgccgaccacaggctgaccccttgtttcatgccagcacctcctctgggcgcctgtggctactcccccaacggcactggcaggtcccctgctgctgctgagcctgcccaggcctgtctgctacagcctgtcagtgttgcccaatgtgggccccatcccagcccttgagaggagtcacctagtagtggggtgcaagctggagccccaaggaagggaattcaagggaaacacatcgtgggcataaggctttgagagacgtgggtctgtccctaccggaggctgcatcacggaaggcgggcacacaggcctcacttgggcgagaagagacccagagacgcatggccttcctcctgggccggctcccgaccagagcccatctgagctcagcccacaggaaggggaggtgccaagaaccccaagcacaggtggctgcaggctggtgggtgccgaggaggccactaggaggctgagacggtgagagccagggccaggcagtggcctgagagctggacagcctctgggtatctccacaccccacccttctcctgcctttcagaagagtaaacgcaggagaacgccctgaggccccggaaggaaagtgacaggcagcggctgagctggggcgacaggaagtggcagctgtctccgctgtttcggaggcatgggaactgtttcctggtcctaaagtgaggaatgctggcctcatgccccttgggccaggactctgcactgagtgctgagtgcctgggctggtgtttagacgactcgtggtctctgttggcactgtctggggacagcaaaaagcagcaggggccagtgtgcaggggagattctgggtaaaattcatgaaaagggaactttcaaaaggggcccatggggccttcccaggtctgccaggccagcttacagctccaggtgggcaccctagcatctcagggccatagaccagcaggtcaccgccatgtccccggggaacagcactgcctgccactcactttgcctgagacccgtgtctcagggctgctccctgcatgtcttggcaggagggcggacagctgggaaggaggccacacgctcctccagggagcctggctctgcaggagctacgccagccacacacttatcagctgcccgacctgctcaggacactgagggccacatgcctggccaaaggcctctccccactccctcttctcccctggagaccaggcccctggagttgctctccagagatctgggcaatgaccctctggatcccagggtttttggttcccctgggaaaagaggcaaaggcccacacacctgcagcaggttgggggtggggggatgcatggcacagtggcttggcacccgggtggggcacagatgccgcgggagtggggagtggggagtggctgcctcgaaccctgctgtgtggcttgtcaccctccatggcgtctctgcgcctccgtttgactccagctgcacggcacacggggcgaggttagcatcaggggccaaagcggacccccgccagaaaggaggaagaggcccccaggtaggtgcgtgcttctggacctggcgctcggcacactgtgaggatgggcggatggagttggtctgcaggttccagaatgaatggggccctgttgtgacaggagaaggagggcagcctgggttgaagaaacaccccctgctgtccaacagctgcactgcccgctcccctggcaacacctgccacgtggactggagaagacacattagcccttgggctggaagtcgtggaccggcgtccacctgagatgggactctgggagggaacagccgccggccctcctgcctcagctgctctcagcatcctacagtgccatcgggtgctctcaggacagatgcctacagaacaggcttttctaaagaaagggggtgggctccagggcccagagtcacggcacggacgagggggctttggatcactctgcacacacctcaggatggaagtcctggtcagcaaatgcatgagcatttctggtggacccacctgctcctggggcaggctggtctctatccccattcccaatcccacgtgcctccttgcctctgtccacgtgatgttggagcagcaagccttctccaagctcagagtcagaggccacaggccactgtccccttggccaggccgcagtccttgactctggagcactcggagagcaagtggcagagacgagtgacctgcggccgctctggcgctctgcctcctagtgagatgagtgtcatggcttgcccgggtcctggagttgtgctgagagagcacctgacctgtgatcccacccctgaaaacgggctcctctgtggacagccgggctgttcttgctcctcgaaggagtcccccagcccctcaggaaagaggttcggccctggtcacagactgggcataaaatctgcatatttatagcagggtccgccgaaagcctaaaacaacagtgagtttcagggcaggatctctcttgcttgtgttgcattggtgtcatgttatcgctggctctgagttttaaagggaaatacacagggtagtgcatgtgacggtgtccaagacgcacagcagattttcattcacaaaaaaatctgaccacaagagctaaacggaaataccttccgctgtccttcccaagtcacagagcaaacacctcagttcccaggggtccgcatcagttctggtggaggcggtgactgtgagcgtgaccagctgggctaattcgtcctgacatttagttgggacagctatagtttcctacctctatgaccagagagtgaagcgtttcactgaagaactgtggccggcgtctccaggaaaggaaggagcctcgctttctccagggcaggggcagcgtggggcggggcaggccgggtgtgtctgtggggagtgggcgcgtgctcacactctttaagctgcgactgcttcctttaggacagaatgaagttcttcgaggaggccgatgaagacagaatatggataaggccaaacctacacaaaatccttctacatcttcatatcaaaacatgttaaacataaacctccaaatacctacagggatacaagcacagggcttcctaaacaggcgggatatgcagcctcgttctatcccaggcccacacagaaagtgttgggggagtcactgaaggaaggaggagaaagagctcagaagaagccataagagagcaagacatggacaggaaaccaagtggccccagcgccccgcaggagagctcagactccagggctggggtggcgcagagcggggcgtgtggagcgcatgcctgcgaggggcctacgaggcggctgcgaggcataaggttctgtgagcccggtgtgagctggcagatgttaccacaggacaaaattagaatgtgtaacttgtaaaacagcagagaaaaacttgatttctcccatgtaaaacaagaatgtaggaaaatgaaacaaatggaaaataaataatatggagattaagttccagtagacaatagttcaatggatatttatagatgagtaaactgactaatgaaaaagaattcttagattgaactttttaaaaataaagatccggccaggcgcggtggctcacacctgtgatcccagcactttgggaggctgaggcaggtggatcacgaggtcaggagatagagaccatcctggctaacaaggtgaaactccgtctctactaaaaatacaaaaaattagccgggcgtggtggcgggcacctgtagtcccacttactcgggaggctgaggcaggagaatggtgtgaacctgggaggcggagcttgcagtgagctgagatcgcgccaccgcactccagcctgggcgacagagtgagactctgtctcaaaaaaataaaaaatgaaaaaaacaaaagatccaacaataaaagatccagttaaaaagacagaaaaagtaaaaattaaaaaataaaatagaattaggcagaaaacgtcataagaggcaaagaagtctgttttttttttttttgagacagagtctcactctgtcacccaggctggagtgcaatggtgtgatctcagctcactgcaatgtccacctcccgggttcaagcaattctactgcctcagcctcccgagtagcagggattacaggtgcctgccaccacggccagataatttttgtattttttgtagagatgggatttcaccatgttggccaggctggtcttgaactcctgacctcaagtgatccaccctcctcggcctccaaaatgctgagattacaggcgtgagctgccatacctggccagaactctgtattttaaaaggtaagacttcagatgcagaaaaaagaaaaaaataaataaaaaggtacaacttcaaaacatgtcaagtactgacggacagagctgcaggaaagaggtaactgagagtagatgaagctgttaactcacccatgttcctcaaaaacaaacaaacccatgtcctcctggcaaaaactcattcatcaacggggactggttggcttgagtcatgaggcacaggaggtctaaccttacaggtagatgattcactttctctttcggcaaacagaccatgcctagaatctcatcataccaggccacagagcaagtctcaattcatttcaaatgtaacacaataaaatttgaaaccaacatcaaaacctctcatcctgcttctgcttcaaaattgtaaaacctactactgaataatttttggttatagagaaaatcataaaatgaattatttatgccgggcacggtggctcgcgcctgtaatcccagtactttgggaggccgaggcgggcggatcacctgaggtcaggagttggagaccagcctgaccaacatggagaaaccctgtttctattaataatacaaacattatctgggcatggtggcacatgcctgtaatcccagctactcgggaggctgaggcaggagaatcgcttgaaccctggaggtggaggttgcggtgagccaaagaaaaaaaaaaagaaaagaaaaaagagcatatgtgcaggagtagaaatagacagaagacagcctcatcatctcctcagcacaaaaacagaatcaaagacagactttgtttgtttgttttttgtttttgttttgttttgggacggagtcttgctctgttgcccaggctggagtgcagtggcgcgatctcggctcactgcaagctctgcctcctgggttcacgccattctcctgcctcagcctcccgagtagctgggactacaggtgcccgccaccatgcccaagctaattttttttgtattttttttagtagagacggggtttcactgtgttagccaggatggtctcgatctcctgaccctcgtgatccacccaccttggcctctcaaagtgcctagggccctttttttttttttttttttgagaggctgtcttgctctgtcgctcaggttggagcgcagtggcgtgatcgtggctcactgcagcttcaacctcccgggctcaaacgatactcctgccccagcctcccaagcagctgggaccacagacatgtgccaccacatccagtcttcttatcttttaaagcatgttgggccttgttttgaaataaagttaggttatatgttttcttgttttttgtttttgttttttgagacagagtctgctctttcacccaggctggagtgcagtggtgcgatctcggctcactgcaacctctagctccaaggttcaagtgattctcgtgcctcagcctcccaagtagttgaaattacaggcacctgccaccatgcccagctaatttttgtattttcagtagagacggggttttaccaagttggccaggctggttgtgaactcctgacctcaagtgatccatctaccttggcctgccaaagtgctgggattacaggcgtgagccatggtgctcgccttcttgtcttttaaagagtgttgggccttgttttgggtgaaagttgggttatgtggtgttttttcttttgttttgttttgttttttgagacaggagtctgctctgtcactcaggctagagtgcagtggcgcgatctcggctcactgcaacctctgcttcccaggttcaagtgattctcatgcctcagcctcctgagtagttgggattacaggcatgcaccaccacacctgactaatttttgtatttttagtagagacggggttttaccaagttgaccaggctggttgtgaactcctggcctcaggtgatctgcccacctcggcttcccaaagttctgggattacaggcgtgagccgccatgccaggccttggatttctgtagctgcagtttctcaggcaggttctagacgagccttcactgcagacagcatcagccctgttcccacggtgtggctcctcctgagtctccactgaatgtccacagtgatcactggggacccatccccctggctggagcttcagtatgtcatgaccgtgtgcgaggtctggaagttgttcaccttacatgctcctttctcctctttgcctggctttgtggagttttcttctatacatgtacaggctggtcctcagtacagactcaagagaaccctgtgcagatttctggagctcttttctgcagtttcctccttgcgggattctgccctgaaatgccggctccttctgtgtccccagaccctagtgcagtctcagctccgtaagggtgctcagctttgctcaggccctgcttccctccctgtgccggcagcccagaaacggccttcaggcagaaggccagggccccagggttcaccttgcctgtctcccttccaacaagggtggcggtcttgtccgggatctcggactcgtccagggtctcggtcttgttggggatctcggtcttgtttgaccagttgtccaatgtctgcaaacagttgtttcatatactttgtccagttttctagttgttcatggaggaacattaaagtctggtccttgtaactacggcctggccagaagcagaagtgagtgccagccgttgtgtgggcatagaataaatattatcagaaagtaagccgatttggttatttcttaatgtatttactttgttctaaaagttatttcaacacaagttactttcctaagtggcagtcatggtttcgtcactacaatttcaagaaaagagctaacagacatctacttgaccatctgtttctcagaaagttccaagactgccctgtcctttcagaagccacaggtcatgataatcagtgaaggcggggggctggggttgtccgtgccattcagggcaccccagtgctcccttcttggccagagcactggttcttggattcctgtagcttcagtgacaaggtgctgtggggctgtgcatccagcctcataaaatgtcaccagcgtgacctgctctctcagtcacagcttgtcctgagagcagcaatgggactagaacgacaggagcaggtagtgagaaacaagagagcagggtcctctccttcctggacagcaggactgtcctgatcccactgcaaggctgctgtgatggtgaccagtgaggcccgcgctgcatgtttttgcacactgaggagctgcctccattcattccccctcgcattcctggagcccacgtgctccttaccaagctcgcctcctggttcatgtttgggtgaagggctccactccacgccaggctgggcgtggggcccacacctgtcatctcagcactttgggaggccaaggcggcaggactgcttgagcccaggagttcgagaccagcctgggtgacatagtgagaccccatttctacaaaaaaataaaataacatgtaaaaagattagccagctatggtgatgtgcacctgtagtctcagctactcaggagacaaaggcaggaggatcacttgagcctggaaagttgaggccacagtgaaccaagattgtgccactgcactctggcctgggcaacagagcgagaataaagtaaataaataagagccccaaggcccccttgcctgccctgcagcttggtcttgcagctatgttgggctgtccatctcaccttggccatcaggagcctgacgtgcaccttctagtgcaggttacctgggccctgagggggttccctcgtcagtacacagagtgacgccacagatggaagagtggactgtaacgttccctgcgcgtttacagaggaggtacagactgttcttcactgtccccgtttcttaacatgtcacagccggctcctcacccatccatggcggggccatcccgacctgctctcctgaacgaaatgaacgaaagccctgggtgtcataagaagcacaaaagtgcctgcggaggtgggggccagaggcagcatggggacttctggctgggtgaggggggagggacgggggcgtgaggatgagctggtgctgaggccaaatgctcagggcatgtttttatgtcttgggagcccagctggtcctgcagaggccaatcacactgaaatgccactctggcgttctaccatcctttcaggaaaggcccagaacagtctcagctcaaaagcacaggaccccaggcaggggagggagggagtgtgtcctcggcgcccactggctcctgaatgcagaggctggcagcccctgcagggccacagtgactaggtggagggcggctggagctcggctgtcacgatcccgtgctctgtcttctcagtggcgaggtgtgggagtggagacacgctcacccacagccactccacccccaggcgtggtcccactggagcccaccaaacctctaaaattgtaaacatgactcttagctggagggccacctgtggggcaggagtgtgccatgatttggcccatactttgtttggatttacttagttgccaatattttgaaaaggaaacactttatatataaaaagaacaggatttccagcctctctcagaaaaatgggaagacaggcttgttggccccacactgccatggagggcggccctggggtggcactgacatggcctcagaagaccaagcccgcccgcagggacaccactgcccccactccacgaggctggcagtcaccctgtgcatgggcacctagtaccttctctgcagaggaggctctggcctggactggatccagggcttggattcagatcctgattccaccagctggggctgtgtgactttggacttggccttcatctgagcaaagagccccagcctgcggcaaccactggggccgagcagggcagtcactggagccctgtgtgatctccagcggaggctccaccagcattcgggctgtccgggaagagggggcaagagggggcaagagggggcaagagggggcaagagggggcggcttttgtccttctttccctttggatctttagatgagaaaagcctggctacaaggtgtcttcaacacacaaaactgcccagaaatgctctaattctacaaacagtttaaaaaaattaaccgagttagcagccagttaacagaattatgcgaccttaggatacattttatgggccaggcatggtggcttacgcctgtaatcccagcgcttagggaggctgacatgggagcattgcttgaacccaggagttcaagaccatattgggcaacatagtaagaccctgtctgtacaaaaaaagtttttaaaaattagctgggcatggtggcttacatctctggtcccagctactcaggaggatgaggcaggagaatcacttgaacctgggaggtggagtgagctgagatcgcaccactgcactccagccggggcgacagagggagactctgtctcaaaaatacaaaaaatttatgcaacctttttttttttttttttttttttgagatggagtctcactctgtcgcccaggctggagtgcagtggtaagatcttgactcactgtaacctccaccctccgagttcaagcgattctcctgcctcagcctctggagtagctgggtttacaggtgcctgcaaccgtgccaggctaatttttcttatttttagtagagatggggtttcaccatcttggccaggctggtcttgaactcctgacctcatgatccacccgcctcagcctcccaaagtgctgggattacaggcgtgagccaccgcgcccggccacaacctttttttttttttttttttaaagtaaacatctcaaaatctgtggagaaacaaatataaatttcaaaagaacaaattttttaaagaaaaaaaaagccagcattaacatgggacaccctttaaagttgtgaccatttttgctcctaaaccatcctctgcagctggagagtggggtggggagtgagggtgggaggcaggggggcctccacctagaagaaaacaaaatcactcacctccgacccacccacagggtgcatggcagggaccgcctccaaatcccacccccagggagcggcccaggggcggcccactgagccctggccccaatcttgatgaggctctacatggcggccctacccacttctcctatgcagtcttccccacccccacagcacagccgaattcctcagaagctctggccaagcatctcctctgaccccaggacatgcttggccctccccctgctctaatcagacaagtcccttccagaactccagggtgcagaacaagggctgggccttgggaccctcagctatgggatctgtggccatgtagcgttgggcctcatttctgcatttgacaatgggatggtagtagctgtacagccttagcctaaagacctgagcacaggtgagacaccaggtatggtgtctggcacttagtaggcactcaacaaatactcgaggaaaacacacagaaccattcccattatgtgtatctgtaaaccaggcttgcagccctccctctggtctccagtctaggtccccccacagcagggccctctccggaaagctcctgtctcccttcgagtccctgactttcagaagtcacaacaaacgcccatttttctgttgctagctttcctagtcccctttgaaaaggacaaaaatgtcgacaacacataaaccacatataagatggccaattgataggaaaaatgaccaacctcatcatttaaaaatggcgaattgggccaggtgcgatggctcacgcctgtaatcccaggactttgggaggccgaggtagatcacttgagcccaggagttcgagaccagcctgggctaacatggggaaaacccatctctacaaaaaaaataaaaaaattagcgaggcatggtggcgcacgccataaccccaactactccaggggctgaggtgggaggatcacttgagcccaggaggtggagtttgcagtgagctgagattgcaccactgtactgggcgacagagggagatcctgactcaaacaacaaccaggcaaattaggccaggtgctcatgcctgtaatccagcactttgggaggccaaggtgggaggactgtttgagcccaggagttcgagaccagcctgggcaacatggcaagatcctgtctacaaaatgtaaaaaattagccaggtgtggtggtacgtgcctgtggtcccagctacttggaatgctgaggaaggaggaatgcttgagcccgggaggttgagaagcctgggaggttgaggctttagtgagccatggctgcggcactacactccagcctgggcgacggagtgagactccatctcaaaatacatacataaaataaaatggactagaaaaaaaaggcaaattaaaaccaataatgaagtatcagttttgacttatcagattggccaacaaacaaacaaacaaacaaaccatttgctaaatccaccaatactgagtgaggaaaggtgcctcacgcctgcaaccaggagcagggggccaacgtcctgggggcaattgggtaacagcgctcagaactcaaactgaccctacctttgaccagctatttcccttctgatctaacagcagcctctgtgagcacgcagggcacacgcacaggaggttcactctcttaagagctaaaaacgacaggccgtccaagtgtccacaaacatcagacaccaaaacaaagggaggtgagccgatgcggcggctcacaaaactaccagaaagatctgtcggctctgtgtgtactgacataaaaaatactgcagacataaataaaaaagcaagctgcccccacgatatgcaattgacaagaaaagaggatatacacatatatttaaaaaaccacttctgttctgagggtggctggggagtctggaggggtgcagggggactgggcagttgtggcctggtgggtagggactgggagggagtaagagaagagggagaaggaacacagtccactgaaacccagtgtggtgttatccattagcgcaggactgaaacccgatgtgggtgttatccattagcgcaggactgaaacctgatgtgttattcattagcgcaggatgccccacgcatccggagatggggtttggaacatcctttgccccagcgaggtgcgaggtgctccggaacttgcggggcttagctgcccacacacgtgggacagactgttgggtggctggtccctgtaccggctcctgaaaggacatttgggcacttgatacacacccataaggtgcactctagggaggtggaggcaggcctgctgcagggggtcggcttcagaagcaggtatttctttggggtgaggtcagacatctgcctgggtgcttctctggaactgccttagggagagcttccgtccgcactgggtgccactcagtctgccgcgctttttatgtacgctgacttttgttgtgctgctgaagaatatctttccagtttgatgatttttcaggtaaaaacactaccttagaaatctgtgatttcttcacccgtatctaaggttaaccctcttccggccatttgtaaatactccattctacttctgcgtattttcgtggtttgccttggagtccctccctcgccctggaatgcctggtagtgtgtggtccccgtgagaggaagcggagatcagagtaagctgtgttcccaccctgccaattgctgaatggttctttctttccttggctcctggagaacaactacattcttatctaccaggctccactgagcgggcgggaggtgggggcgggggtgggggtgggagtgggggcaggggtgggggtgggggtggtgagaaattagtcgtattttgattagaatgacactacagattactttactttggagaaaactgctgcctttgtatatttaatgcttccatccaggaagtgtcatttttttaagcctcaaacatttttttggataatgcttggtagtttctctagcattatctgagactaacatcttctgagactcctgggttttgtagactcggggcctcccatgctcccatccctcacagttatctccctgtacgtggagcagacaggaatcaaggatcatgcccctgcacctgtgggtgcccccccacccctgtgcacctacgggtaccccacctgcagaccatgcccctgccctccgagacattctgaagcagaccgatagaatcaagtttaggaagaaaaatggcatggcctggggctggtgcaggaaggaaggaagctggatgggggacaggtctcttgggcagcctttggaggaggcaggtgctgggcaaacaaggagggtgcctgcaggtgctgcaaggtctgcaggtggggtacccacaggtgcacaggggttggggggcacccacaggtgcagacaggctggagctggagtgcaggtagctgggggaagaagggagggagatgaggctggacgtgctgggccccagcagtctgtgtgggagacctatctatctgaggctgtcataaaaacgcaggtgagagaggaggctaggcttggaggtgggtcctccaaagagccgcatccagggtgtatgggggagccccgactccagccagctgttccagcctcagaggttggccgtgccctgggacggggtgactgctgggtctggataggttggcaaagcagggctgaggacatgagcaggagggtggttcggggcctatcccaggtccaagaggagtatggctgttcaacacagctgtgtgacgtcgtgactaaacaccatatcctacaatagtcgttcatgtcattaatttagatgccactaaattgttaactatttcagtatcatttcattattattattattattttttttttgcagagatgttgcccaggctggtcttgaactcctgggctcaagtgatccgcccacctcagcctcccaaagtgctgggtttacaggctgagtcactgtgcctggcaacattattactttaaactccaatcatgactgtgtagtgtgcatactctgttacccacaatgcatggaacacgtttaaaaaagaggaggaaacttcctctccgtttctagaatggagctttcagactgcttgtctggcgagcgactgccgagctgcgctctgtcctagtgtcggtgcactggagggcgcagtgtcgcatcttaaccagaaacccggtgcccttaagtggcaccccttacttcaccaacgcagtttccaaggttttaaggaaagtattcttacatgaagtaaaaatatcacacagataattcagttaagcatgctcaaatattcaaaacacaaggaaagcatcaagatacttcgcagatcattaaacaactcaactgcatgaaccactttagtcttttcctaaatccttcacagggtgaatcaaaagccccatggacttatgctgaaacgtatctttcttgcttgcttttttttttgagatggagtctcactctgtcgcccaggctggagtgcagtggtgcaacctcggctcactgcaagctccgcctctcgggttcacagcactctcctgcctcagcctcccaagtagctaggactacaggcgtccgccaccacgcccggctaattttttgtatttttagtagagacagggtttcaccgtgttagccaggatggtctcgatctcctgacctagtgatccacccacctcggcctcccaaagtgctgggattacaggggtgagctaccgcgcccggcctcttgcttgctttttaattgcaacaccgatgctaagaaataccagccgttgccaggcatggtggctcccgcctgtaatcccagctactcaggaggctgggacaggaggattgcttgaggccaggagttctagcccagtctgtgcaacacagtgagaccgtgtttctaaaataaataataaagaaaaaataaataccagccaccctgtctcagcctagggaggcagggacatggcagggcctgcatctggccacctcctccacctgctgaggcccccagtgcttccccagctttcctgccaagaggccccagtgctactgagctgcaggcagcaggctctcgaggacatgacctcactcacagggctcagggtctaagactctgttaagacaggcgcctggagccgggtcatagggaggcaacatgacccccacagccaggagatggacagcaggtctgctgagggctctgggcagcttctccctccctgattaaaagaaaaagattcaggagagagaggcccttcaccttttggccttctcaggggatggtgggagtgtctgcagccattgcggagccattaggagaaaagagaatcccagaggggccacctgaggcccgttgacctgggactgagggctccgatgagctcctgggcctcagtcagcgcgtcctgccatggggccgtgcatgccgcctgctgagaccattttgggcactcaggatatggacccctcagttctctccttattttagtgaggcgtgtcattttccacagttaccacgaggagataaaggccgggaagctctggttcacgtcactttcatatcctgtcctgtgacttgtagctaaaagcatcttaactgatccacaccagcccgccttccctcccaggccacccacactctcagcctcggtggacgtgtgctgctgtgtcaggaacgctccttcctgcagcacggcctcggccccaggtgactcctgtggtcaccagctccctggtctcacagagagcttggtggccctcttcactctctcccggatctgcttcctgaggcgccaacccaccattttacaacccactttctcaagcctcctacaccgctccttcctccttcagagcctgtggccggcctcgggctctcagcctggatgctgagcatgtaagaggaaatgaaaggaatctgccagaaccgtttcccaccaccaggccagctgctgggaccagggacagcctccctggggcctgtgcactcccgcacggtggaggctgccctggccactgctgcagaccctttgcaagggcgtctgtccagcaagcagctcagaagtcggagcaagcatctccctcaggcccagggcaggtgcttgtggcgctctaggactcggagggcaggtgctcgtggttgctctaggactcggagggcaggtgcttgtggtcgctctaggactcggtccccaggcctgggttcctcagctgagatgcatacccactgcacctgcagccactgcctgcccagctgcctgctatgtggacagagcccttggtctctgacccaggagcctcctgtctcccgccaggcttgcttgtcagcttgcaggctgggcaagtgcacagcactggctgcaatcaaccttctggcttcggtgcccacctctgcctctgtcctattaaaggccagccctgcacacgggcaccgagccccttcccctgcctcctccaggacttctctcctgagtcatcccatttcccactgcctaccggcaggctttacatgacagcttgtgagcctcccctcttgactccacatcttcataaatacggcctcttttcactgctgattttcagagcaaagtttcttggatatgttgtccatcccatctcccatcctctccccaagccgggaaggattgaatgaaaattctactacccccctgagaccacacttaagaccaccagtgaccttcaccttgcaaaaaagcaggggctgcttctctgtcctgacctaactggacctacctgtagcgttccactgcacagtttaaccactccttccctcctaataactttttttttttttttttttttgtagagacagggtcttgctctctcacccaggctggagtgcagtgtgtaatcacagctcactgcggcctagaactcctgggctcaagtgatcctcctgcctctgtctcccaaagtgctgggattacaggcatgaaccagtgtgcccggccctttttttttttttttttttgagatgatgtctcactacattgtccaggctggtgtggaacctctgagttcaagcgatcctcccactttagcctccccaaatgctgcaattacaggagtgagccaccgcccggcctatagcaattttcatgtcagacaaaataggttttttggtgaaatacaacatgaggggttatgagggatgttacatactggtaaagggaggaaaagatcaagaaggcaaaaaacctaaacatgtatgcacctaacagcgaacctcaaaacacataaagcaacaattgacaaaaacagatagattgataattgtagtttaagaactaatatttccctctcagaagagttaacatcatagtaatttaattctctgaccagaatgtaaaaatattagaaatcagtaacagacaaaaaaataaaattccacaaatctagaaacttaaggaaaaattccatttaagttaaagcaaaatgagttgagttataagtcctacaagggaaagacaagggaaacatgaggatgttgagatttatgagacatggttaaagcaaagcaacgcttggaggaatatgcatttctttggctgcattggtcagaaaacaagacagatttcagacttgaagaaggcatcatgaagctagcactcctccactatccttgtaaatcatccaaaagcaaaaaaaaaaaaaaaaaaaaaaagataatgaaaagcaaaaatgcaaacttcattttcattaaaactaagagctagaattggtggtggtggcgggggctaccaaaggctgcaggaactcggcaagggctgtgtcaaagacatacagatgcctcgttacagaccccagaaagagcagagggcatttctctaaggcaagggtacaccctgagggtaggacctaattccttgtttcaggagtaggaacatgggctggcagcaagtgcttccctgaccttgttccgttcctggaagagaggagggagagtgaaccaggaacagaacaggccctatctgcaaagtgcagtatctgtggggaaagggaagagagaagctgtatcagctgttaaaagcctgataggtggagacttgtatttaaagctaaaatcaacgacacgactctgctgggctggaagatggttctggcttcattttccatacaaactttttcaaatagctagtcaagtaaaaatttacctgttctaaagatgaggccaggcacggtggctcatgcccgtaatcccagcactttgagagcgtaaggtgggaggatcacttgagcccaggagttcgagaccagcctgggcaacagagcgacaccttgtacctacaaaaaactaaaacaatcttagctgagcgtggtggcgtgtccctgtggtcccagctacttgggaggctgaggtgggagaatcacttgagcccaagaggtcaaggctgcagtgagctgagattgccgcactgcactccagcctcggtgacagaatgggacactgtctctaaaaagagaaaaagaaaaaaaaaatgaggggggagccaagaaacgaaagtgctccaagagaaaaggagaaaggaaacaagcaaacgaatgaacacgaacgtctccagaagaactttccattgagttgatgaaaatttggacaaaatgttttgtggtgaattaaaaatgcaaggaggcggtgcccctaagaatcctgagcacagaggagagccatggagtgcaggtgggagggtcaggaagacggagtgggacgcggctgcgtggaagacagagagaaacgcgccacattcgtgatgccagcactggagcacacggggaacggaagccacacaaccccattccttcctaaggcagaagggaagctgcgtcaatcctaagaacacttacaatagtgtttgtggggaggggctgggggaaccagactcagacaagccaagtctaaaaattatatacaaaaaaggccgggcatggtgactcacgcctgcagtctcagcactttgggaggctgaagcgggaggatcgcttgagcccaggaatttgagatcagcctgggcaacatagggagacaccatctctactaaatttttttttttttttgaggcagagtctcattccgtcacccagactggagtgcagtggtacaatctcagctccctacaacctccacctcccaggttcaagtgattctcatgcctcagcctcccaagtagctgggattacaggcatgcgccaccaggcccagtgaatttttgtatttttagtagagacggggtttcaccatgttggccaggctggtcttgaactcctgacctcaactgatccacctgccttagcctcccaaagtgctgagattataggcacgagccactgcctccagtcctctctctactaaatttaaaaagaaagaaaaaagaaaaaacaaatacatgcaaataaccaagaaaaccctgagagagaaggataaagaggagatcctacatcagccagacatgtaaaaggaccaggaagtgacactgattctgacccaatggaactgcctgtgaacagactgagagtggccgaacgaaccgtccggatatagctccaaaagcacatggaacatttagcaccatgacaaaggtgggagtccgaatatgcgggaagtgtgagcgatggaaaactgggagccgttgccactttgggggttaataagaagtggttctggccaggcacggtggctcacccctgtaatcccagcactctgggaggccgaggtgggcggatcaactgaggtcaggagttcgagacgagccagcccagcattgtgaaaccccgtctctactaaaaatacaaaattagcctggagtggtggcgggtgcctgtagctccagctactggggaggctgaggcaggagaatcatttgaacccgggaggaggagcttgcagtgagctgagattgcgccattgcactccagcccgagcaacaagagcaaaactccatctcaaaggaaaaaaaaaaaaaacagacaagataaaaaacaaggacattaaattacataaaaataaaaaatatgaacataaaaaaacaccataataaacatttaaaaacatgaagaactgggagaaaacatttaaattgttgtcaccgaaaaggcctaatttctatcacatataatgagctgctacaaatcaataagaaagaccacaatctaatacacaaatgggcaggtaactgaagaacagggaaaggaagtggctcctaaacacacacgaagatgcacgacctcccagcagaggcgctgatgccaatcctgctgccaccggcaaaagttccgtgtggctacaggactctcagacactgctgctgggagcagcctctgggtgggtggcggaggctgaggcgatgctgtccaccacacgtggcacgcgggcagccttgactacgcaagcccctggggcacgtacacgtgtgttttcacacacactgcagcctgtaaggttactattctaacagtatctgtgacggtaaaggactggaaatagcctaaaatgcgcatgaaggagagaatgattaaatgaatgaggcacaccctcatgacggaagacagaagctgtaaggtaagaaggggacgccctccatgcaggcacacaggaaggacgcacgctcccgccccaaccacatcacacgtcccgcaactccagctgcctcgaagcagcatctgtttccctccccccttctcgctacatcacagacccatgcagtcctcacaaggtgcacccttcaaacagacttttctgaaaacttcctgagaccagtagcaggagctggcactgtgacctgctgagtttaccaggcctatgacttaggtgcagagaagagtctcagggcggcaacgtccgcgcagcaaagcaggacgaggatgaggatgcggctgacacttgtctggcccgtgaggctgagcatcactggggtcggcctggctcttccccgggagcatcgctggggtcgacctggctcttccccaggagcagggccgtctaaagtgcaccaatgcccacgcgtctcacctgggctccattctaagtcagcctgcgcccgggtgtacagtgctccattctaagtcagcctgcgcccgggtgtacggtgctgcattctaagtcagtgtgcgcccgggtgtacggtgctgcactaggaaatggcatggtttctgcccttcagggctttgcaccataacccgggaaacactcaggtgccaaatgagaggtaaagagactccatgcattactcaaccaaagtgcagggatttcagggtgcaggaggcacgcagggtgctgactctccacatgcccctcggagagggtggccctcgccagctgccagctgtgggcagctcctggggagggcagtctcctacctggagttgagtcaccctgggaggtgacaccagaagggctggatcccaggtctagcaacctccacatgtcctggagggtgccactggcaaaggaggaggagctgtgggattggcgaccatgctcctcagggtgctggggagcctggggtggctttggggacctgtcttctttctgccgaggtgatttacaggtcaccgtgtggatgctgtgttgtgtctagaaaagacatcatcgtcttgaaagccaccctctccaacccagaggaagccacaggactccccccaaccactcccctcggagcagtaaggcgacagtgggcctggcttaaaggcccaggcagatgctcccaggatcacccaggagaggcagctgcagacagggatgcatccggggagcgagtctcagcgctgggaacgctgagtgtgggcagggcctgaatctcagtgctcgtctcaacacttaaatgacaaaacatgtctagggcagaggctgtttcgtttcgatggggaatgagctgaaatgcagggcagataccctgaggggcacagaaaggaaaggccagcgtgggccccatgtgctttaggggtcccggggccctcctaacactcttaccacccttgtgggaccacccggcaaacgctctgcagctcaccctgccattgtgagcagtccctgatgacggcacaaaggcaggcatgcagagcgaaggcccctccgagaggcccagagcacccaggccccggcttccctgctggccacaccccacacagctgcacttgctcgggcgccgccactctcaccttcgggccttgcagggcgtcaagtctgctgcccacctgtgctgagcggggctggtgctttcccaagtgtctggaaggagcctcatcctcggcactcttggcgtcctgccgtggggatttaaatgagaggactctggtattcacatgtactgatggtgcatgtcagtgagttttcccacaagattgggaagaaatgccttcccacatttctggtattaaagactcacaccatttggtgacagcccggactgaagggacctgtttcccagacaggaggaatggagcaggcttccccagtcattcattcccaggagccttctctgcaaggccagggcagcctatgcatggcctgcctggggtgagagccccccggcccaagatggacacgagtggcccccagtgacaccacctggccgatcctgcttttttgttttttttttttttgagacggagtcttgctctgtctcccaggctggagtacagtggcgtgatctcggctcactgcaacctccgcctcctgggttcaagtgattctcctgtctcagcctcccaagtagctgggatgacaggcacccaccaccatgcccggctagtttttatatttttagtagagacagggtttcaccatattagccaggctggtcttgaacacctgacctcaggtgatccgcctgccttggcctcccaaagtgctgggatcacaggtgtgagccaccacgcctgacctgatcctgcttcttgaacccatcactggtgcctctgcccgccccatgcctgatgtctccccccttctggagggaagactgtggaaaggaagccaaaagggggcactagggagcaaaccctaagaacatggaaaggaaacatggaggaaaacagaaagggaaattcaaagcagtgggacctgtacagagccatggacaatagatggcctgcaaggaggctgtggaacgagcccagccctgccccttcccaggcacaccatgagtgtgcccacaacagtggatgcagagtgtacttggcccatgtttaccaacgtttgcctgttcacccgaggaatgcacatgcatgaggtctgatgtaaggtccctgatgccagtgatcacgggcacagcctgatgctcactgccccccgggcttcgtccccagtaccttctgatcagaccctttgcctgtttgtcacagggtgatttgtctttttcttattgatctgtaggagttcttttctgtatttgtatcttatttcttctcatatggcaccatttactattaaaaatacagaggaaccccttgggaggctgaggcaggaggatcactggagcccagagttctaggttccagtgagcctggatcacaccactgtactccagcctgggcaacagagcgaaactctgtctcaaaaaataaataaataaaaaattaggctgggcgcggtagctcacacctgtaaccctagcactttgggaggccgaggtggaagaatcccttgactccaggagtttaagatcagcctgggtaacatattgagaccccctatctgtacaaaaaaaaattaaaaattagacaggtgtgatggcacacacctgtggtctcagctactacggaggctgaggtgggaagataatgtgagcctgggaggaccaggctgcagtgagctgtgatgtcatcatggcactccagcctggggagcagagaccctgtctcaaaacatttttttttgagacacagtcttgctctgttgcccaggctggagtgcagtggcgtgatctcagctcactgcaacctccgcctcctgggttcaagtgattctcctgcctcagccttccgagtagctgggattacagatgcccacccccatgcccgactaagttttgtatttttcagtagagatggagttttgccaaattggccaggctggtctcgaactcctgacctcaagtaatctgctcgccttggccccaaaaagtgctgggattacaggcgtgagccaccacacccagacaaaactttttttttttttttttttttgagatggagtcttgctttatcacctaggctggagtgcagtggtacaatcttggctcactgcaacctccacctcctgggttcaagcgattctcctgcctcagcctcccgagtagctgggattataggtgcctgccaccacaactggctaatttttgtatttttagtagagatggggtttcatcatgttggccaggctggtctcgaactcctgacctcagatgatctgcccgcctcagcctcccaaagtggctgggatcactggtgtgagccaccacgcccagctccttttttttgggggggtgggggtgggggacggagtctcactctgtcacccaggctggagcacaatggcactatctcagctcactgcaacctctgcctcctaggttcaagtgattctcctggctcagcctcccgagtagctgggattacaggtgcctgccaccatgcctggctaattttttatatttttggtagagacgaggttttgccatgttgcccaggctggtcttgaactcctgacctcaggtgatccacccgtctcggcctcccaaagtgctgggattacaggcatgagccactgggcccaaatactggccacattttttttaaaagaaaaataaatgtaggccaggtgtgttagctcacacctgtaatcccagcactttgggaggctgagacaggtggattacttgaggtcaggagttcgagaccagcctgggcaacatggcaaaacctcgtctctatcaaaaatacaaaaattaactgtgtctggtggtgtgtgcctgtaatcccagctgctcagaaggctgaggcaggagaatcgcttgaacctgggaggcagaggttgcagtgagtcaagaccacaccactgcagtctagcctgggcgacaaagtgagactccatctcataatgaataaataaataaaataaatacatgccgggcctggtggctcacgcctgtaatcccagcatttgggaggcagaggtgggcaaattgcttcagtccaggagtttgagaccagcctgagtgacacggtgaaaccctgtctctattaaaaaacaaacaaacaaacaaaaattagccaggcgtggtggtgcatgcctgtagtcccagctacttgggaggctgaggtggaaagatcacttgagcctgggagacagacgttgcaataagccgagactgtgccactgcactccagcctgggcgacagagcaagaccctgtctcaaatataaataaatacattttaaaaagaaataaaaaaggaaacacaaagcagtcttggctccatagagttttcttttctcagttttaagagttatttcttatgcctgtaatcccagcactttgggaggctgaggcaggaggatcacttgagttcaggaatccaaggccagcctgggcaacatggcgaaaccctatctctacaaaaaatacaaaaaataaggccaggcatgctggcgggcgcctgtaatcctagctacttgggaggctgaggcaggagaatggcgtgaactcgggaggcggaggttgcagtgagcccaaattacgccactgcactccagccttgggtgacagagcgagactctgtctcaaaaaaaaaaaaaaaaaaaagaataaataagaaaggatagccaagaaaattttgtaaaggaacagaaataaggtcaagcttgctctaacagatattaaaataggtcacaaagccacagtatttaaagcggtatagtaccatttcaggaacagacaactcattggaactgtgtagaaaaccccaaaatcaatgcagaagctgaacttctcaaggctgcaacatgagacagatccacagtctacaaaacactgcctgacttttcaaaaagacacggaaaggcggagggagtgttctgggttaaaggatgaaaacacaagagccagatgcagtgggaattcgggactggctctgaggttacggaaaattagcaaggaacacacataaatcacccacagaagaagaactataaatggccaataaatagattaaagcatttaatgccactaaggatataagaaatttccttccttctttgttttttggtagagacggggtctcgctgtgttgctctggcgggtcttgaactcctgggctcaagcagtcctctcacctcaacctcctgagtctgggattacaaggtgtggactaccacaaatgggtaatttatttttatttttatctttctgtagagacaaccttgcttttttttttttttttttgagacggagtcttgctctgtcgcccaggctggagtgtagtggtgccatctcggctcactgcagcctctgcctcctgggttcaagcaattctcctgcctcagcctccccagcagctgggattacaggcgagtgccaccatgcccggctaatttttgtatttttagtagagacggggtttcaccatgttggtcaggctggtctcaaacttttgacctcatgatccacccgcctcggcctcccaaagtgctgggattataggcgtgagccaccgcacctggccatcttgctatctttttaaagatacaagttgtggctgggtgcactgactcatgcccataatcccagtactttgagaggccatggtgggcagatcgcttgagcccaggagttcaagaccagcctgggcaacatggcaaaactccatttaaacaaaaaatataaaaattagccattaggcatggtggtacacacctgtggtcccagctacttggaaggctgaggtgggaggatcacttgagcctaggaagccgaggctgcagtgagctgtgattgcaccactgcactccagcctgggtgacagagccaggccctgtctcaaaggacaaaaaaaaaagaagtttttgggttctgggtgacagagccaggccctgtctcaaaaaaaaaaaaaaaaaaaaaaaatagaagtttttggtttttttttcacttatcataccagattaaaaaaatagtacccagatatgtaaagctatagtaaaacatatacatgatacaatttgtaatgaaaaaataaaaaaaaatgggggctgggcgcggtggttcatgcctgtaatcccagcactttgggaggcagaggcgggtggatcacctgaggtcaggagtttgaaaccagcctggccaatatggtaaaaccccatctctactaaaaatacaaaaattagtcaggcgtgttggtgcatgcctgtaatcccagcaactcggaaggctgactcaggagaattgcttgaaccgggagggggaggttgtagtgagccgagattgcaccactgcactcaagcctgggcaacagagcaagactgtctcaaaaaacaaacaaacaaatgagaaccaaaaccaaaccaaaacaaaacaaaaacccagcagaaaacacattgaaatgttactaataactatatctggatcctgaaaattggaggctttttatattgtgtttattgtaatctgaagtttctgtaatgaaaacgacacaattagggaaatatttttaaaaatgcatgtcttagatgaaggggtgttacctgagatgtaaaatggggctgcacctgtcccaaaggtgggctgcgatccaaaggcctcctgggctcctcgcctggcttccgggcctcaggggcaggagggagggcgtggtgcaacagccaccctgggaatgggatggggacagagtttgttctctgtgcatcacttctggattcctcttgtgttgaatgcaaacactcagaaagaacagcatgttccttttcaaaaccaaagtaacttccattacatcgagaacttggggagggccggacaacagtgaactgtgacacacagcatttcggtagagctcttgcacacacaatgccacgcccctgccacacacagcccttgctgtcctcacagcgggggcagcaagcacattcgctaacagaagcacccagacgccctttctgtggcaggcacaaagaagaagcaaaaacttgccaggtgcggaggctcacgtctgtaatcccagcactttgggaggctgaggcaggttgctcacttgaggccaggagttcgagatcagcctggccaacatggtgaaactccgtctctactaaaaatacaaaaattagctgggcgtggtggtgggcacctgtaatcccagctactcgggaggctgaggcagaagaattgcttgaacccgggaggcagaggttgcagcgagccgagatcatgccactgcactccatcctgggtaactccatctcaaaaagcaagcaaacaaacaaacaaaagaagcaaaagcttaagtataacaacttaaaaatgatggttctactcaaagcttcggcatgctagcttacttagaaatgaccccacatcaaacgagatcctttcatcaattccattcatgttatgttatgtaaagatctgctccttctctaagcagacacatcagaagacataattactgaaataacatttcccaggattacaaatcagtttcgttaaactcactgaggattccaacaaggtttttggagggtgtttataactgttgacatttcacatattggaaattgaaacagacatttttttttttgagatggagtttcgctcttgtcccccaggctggagtgcagtggcgcgatctcgacacccccagaacatccacctcctgggttcaagcaattctcctgcctcagcctcccaagtagctgggattacaggcatgcgccaccacgcccggctaattttgtatttttagtagagacggggtttctccatgttggtcaggctggtctcgaattcccgacctcaggtgatctgcccgccttggcctcccaaagtgctgggaatacaggtgtgagccatgtgcctggtcaaaacagaaaaattttaaagcttttttatcaattaacttgaagttagccatgatgaacatattgcttatgatcaacatctgaggagcatcgcaggattagctctgccctgtggacatcccgagatgggccctcaagtaaagcatcagtttcttctacgcaataaaagaacccaaagatgacacttggaaatgaacgtgtttcccttggtttataaacacctgaatttaaaagccatgaagtcagaagatgcacgtgtgggcaaaaacctcctgaagacactcaacaccattggtcaccaggagaatgtaaaatcaagcccactatgggatcccgcctcacacccactaggttggctgggatcaacaggatagaaaacagctgggtgcggtggctcacacctgtaaccccagcacactgggaggccgggtgggggggatccttgatgtcaggtgttggatactggcgtgggcaacacagtgagatcccacctctatttttaaaagaaatttttttaaatataaaaaaaataaagtttttaaagatatgcaataaaagtattcttaattaaaaaaaaccccgacagaaaatagcaagtgctggtgcagatgtggagaaatcagaaccttcgtgcgcagctggtgggcatgggaggcggtttggtggctccttaccaggttagacacagaattcccacatgacccagcaaggccacttctagggaggcatccaagagaactgaatgttcacagcaatattattcacaatagcccaaaggcggaaaccatccaaatgtccatcaaactgatggacaaatgcctacagtggcctgtcccccagcaaagagctcttcccatggaaaggaattaagtgcagacgccccagcacgagggaccctcaaacaggacacagagggaaagaagccaggcacaaagggacacatcctgtgggatcctgctgaagtgaaacgtccagaacaggcaaaggcatggaggcagaatgtgggtgctgggcgggggacaggaagcaactgcgaatgagtgtggggtttcctctgaagtgaaaggaattctggaacaaatgatgatgctcgcacaacattcttgacgtgcttaatgcactgaactgtatactttgtatacttcatgagctttcaacagtacattttatatgtatagtaccaaaaaaaaaaaaaaaaaaagaaaactagtttttttgagacagagtcttgctctgtcacccaggctggagtgcagtggtgcaatcgcggctcactgcagcctccacctcctgggctcaagcgatcctcccacctcagcctcccaagtagctgggaccacacccagccaagttttttgttttttagtagagacagggtgtcactattctgcccaggttagtctcaaactcctagcctcaagtgatcctcctcccttggcctcccaaagggctgggattagaggcatgagccactgcacccagctgaaagctaggtcttgttttctcaatccttacttggttgaaagaaagctagttttttaaaaagccatgaaatgtgttaaaatcttagcaaagttagcccaattttgatgggtttgtttccttggtgtactacttttttttttttttttttgagacagagtcttgctctgtcatccaggctggatggagtgcagtggtgtgatgttggctcactgcaacctccacttcccaggttcaagcaattctcccgcctcagcctcttcagtagcttggattacaggcacctgccaccatgcccggctaatttttgtatttttagtagacaaggggtttcaccgtgttggccaggctggtcttgaactcctgcaagcatcctatgatccgcccacctcggcctcccgaagtgctgggattaccggcgtgagccactgcacccagccttccttcgtttactatttattgacttcccctaaactatgaagggttattctttactttctatgtaatctgttcagacagcaaaggtgctgtcttaccagggtaattttccgtgcttttgttgacttattatgtcttgatggtttcagaaaacaaagcttcccatgcttatgaaagagctaagtttctctataactgttctctcctatgtttaagctttttgtcactttcacgtgggtagctaaatattatttctcaggtacccatgagtcttaatgttcaaatctcctgacatttttttttccttctcaaaattgaattctaaatgtcaaataaaataaagctttcaggagacttttcttttttttttttttgagatggagtctcgctgtgtcgccaggctggagtgcagtggcgcaatctcggctcactgcaacctctgacttcttggttcaagcggttctccttcctcagcctcccgggtagctgggattacaggcacccgccaccatgcctggctaatttttgtatttttagtagacgcggggtttcaccttgttggccaggatggtcttgatctcttgacctcgtgatccacctgcctcggcctcccaaagtgctgggattacaggtgtgagccactgtgcccagccccaggagaccttttatatttaaaatgatctatgagatgtcctagaagttccctggaaaatcacaaaatttttttcttataaaaagagaggtatttgaaataattaggtacaaggtggggtgtggtggcatgcgcttgtggtcccagctacttgggaggctgaggcaggaggatctctttttttttttttttttttgagacggagtctcgctctgttgcccaggctagagtgcagtggtacaatctcggctcactgcaagctccgcctcccgggttcacgccactctcctgcctcagcctcccgagtagctgggactacaggtgcccaccaccacgcctggctaattttttgtatttttagtagagacagggtttcaccctgttagccaggatggtctcgatctcctgacctcgtgatctacctgcctcagcctcccaaagtgctgggattacaggcatgagccaccgcacctggctgagacgggaggatctcttgagccaaggaggtcaaggctgcagtgagctgtgatcacaccactgccctccagcctgcatgacagaggtctctatcgaaaaaaaaaagtaaaaagaaaaaagatgttaaggaaatgattaggtttctttgatgtgttaggattgatgagtgccacgggaagactgccgagtcggaagagacgcatggcctgccccgggtcggaagagacgcgtggcctgccccgggtcggaagagacgcgtggcctgccccgggctgtgtgtgtcaggtaacttgttcgtctgaggcactgaggaactgtgtgctgtgctgcacggagacgtcccgggtgcccacggcgcttctcttcattagagtcccgaagccatttgccagatgctgtcagccggcagcagtccagagctagcaggcataaaccccgtcactgccgttacgttaacttaggtgtcaccttactttaacgtgagctgtgcatctctgatgcccagagtttgtagcagggcgaccgtcactcactctggggctgtgttactaggcagacggccaccgcctgccccacactttttgcctctccactggatattcttggtatagtcatggaatagtcagcttcacacttatctgtaaataatttcctctgtaaaaatcatgctcatccagttttagaaatcagatattctgtttctggcatctttgaaaacagcgtcaacgtcttggattaactttgtctagaactcttttttggactctgtttccagatgtctacaggacaagcaaatgttccttctcagttgcattattcttgctatgaacagacctttcactttgaaaagtggcagtggtaaattcaccatggccatgtgcagtcttttgtcatccacagtttttttatttttattttttgagacgaagtctcaaagaagactcctgacccaggctggagtgcagtggtgggatctcggctcactgcaacctccgcctcctgggttcaagcaattctcgtgcctcagcctttcgagtagctgggattacaggtgcccaccaccacacccagctaatttttgtgtttttagtagagatggtgctttgccatgttgaccaggctgatctggaattcctgacctcaggtgatccacctccctcattctcccaaagtgctgggattacaggcgtaagccaccacgcccagccccatccacgatttttgtgttactctgatgctccccagaaagctcagagtgcttcttcatcttgaacagggactgtctcagagcctgggaaaaggactgggcaggcaccatgggcacaggcttctgatggcggcatttagatgacactgagcccatcccaggactcagtctctagtcgagaagcagatggattgttgagaccaagaaccaagatggagtggaacaagaacggacctcacaggaggggatgaaccgatggtggaggatgacagcttttgttaagaatacggctgatgtttttttaatgttctactttctggatatatagagaactcttcctctttcctctgaagctatgtacagtccacacaaattttgtagtctctgcttttgtgaatcaaaacagaacatttgtaagtgataccttgttttttttgtttgttttttttgagacagagtcacgctctgttgtccaggctggagtgcagcagcgcaatctcggctcactgcaagctccgcctccccagttcacgccattctcctccatcagcctcccgagtagctgggactacagatgcccgccaccacgcccagctaatttttttgtattcttagtagagacggggtttcaccatgttagccatggtggtctcaatgtcctgacctcatgatctgcctgcctcggcctcccaaagtgctgggattacaggcgtgagccaccacgcctgaccaatttttgtatttttagtagagatggagtttcaccatgctggtcaggctggtctcaaactcctgacctcagctgatccatcggcctcagcctcccaaagtgccgggattacaggtgtgagccaccgtgcccggccagggatatcttactctcccggcctgagtcctccagaattcagaaacttgttgagtactcttactttcaaagtaatatagttatttgcatagtttcaatgagaatctttgttttttaccaggactggaattggaaatacttcttgtgtaaccaaggccctgcatggaaggccaaatctgagaagacgcccatttagtcagtcaccagcagccacttgtaaggaaccacagcgatgttacagagcccacatccacgaagccctccaaggagaacccggcacagcgcctggcttgtaggatggcaggtgcatctggagggcattgcctggcaggcccaggaacctgggctagtttggaaaccttaagaaaggaatttgctcaaatttatagggcaggtgaaatctggcgggttcttggcttggttttctagcctcaggacagcaagcaagaggcttttatttattttattttaaattatttattattatttatttatttattcttttttttgagatggagtctcgatctgtcacccaggctggagtgcagtggtgtgatctccactcactgcaacctccgcctcccaggttcaagctattctcctgcctcagcctcttgagtagctgggatgacaggcacgtgccaccacgcccggctaattttttttttttttttttttttgtgagacagagtcttgctcttgttgccaggctggagtgcaatggcatgatctcggctcactgcaacctctgccaccctggttcaagcgattcttctgcctcagcctcctgagtagctgggactacaggcacctgccaccatggctggctaatttttgtatttttagtagagacagggttttgccatgttggcaaggctggtcttgatctcctgatggacctcgtggtccacctgcctaggcctcccaaagtgttgggattacaggcgtgagccaccgcgactgccctaaaattattttttaaagaggcttttaaaagtcaatctgaaattctttacggaaacttctaagaaagcaaacttaagaatgcagagatggtgaattagcactctcgctgcacctatggaaataaccaagccatctacaaaccagctccattttgtgagatcaggaacaacctttctgatccttttgtggttcatccgcctgatgattgggttttcatgcagacgtgtgagctgtgcctccctcaagccttgttacaacatccgacatccgcacattacctgtctgatgcccggggaaaaaacacctttctttgagattactttccatcaaaagcagagaaactgtagggaaaaaaaatgagcttccgtagaaactgctttgtctactgcacttccactgggttatctgcgtccagcccctcattgtctttgcgatttgagctgctttgcgattttaccactgataggcatgcggattctgccctgcctgcctctcccctctaccagaaccagttctgcctccatctgaaactcgattcttttactccatgtagatttgtgcttttttgacctttccttggaactggttacagcatctgtccagtttcctcattgtttaatgaacagaatacaatcctaaacaaatgctcatttttcatatttgggagccacattttacttctttctgaaaattatcttttaacgcatagttaaataagtattgctggacacagttaaacctcagtaaggacactgtattatgaaccaggatgagccatagctgtcctgaacatttctgctctaagtaacacagcactgaagttgtgtttgttttttttttttcttgagacggagtcttgctttgtcgcccaggctggagtgcagtggcgtgatctcagctcactgcaacctctgcctcccaggatcaagcgattcttctgcctcagcctcccgagtagctgggactataggcgcgcaacaccaagcccggctaatttttatatttttagtagagatggggatttcactgtgttggccaggttggtcttgaactcctgacctcgtgatctgcctgcctcagcctcccaaagtgctgggattataggcgtgagccgctatgcccggcctagcactgaaatttataaaacatgatggtgagaaggagaaatggacaaaatcacaggagcaatggaggattttaacactttgtggcttttggcagttcaaattgaggagcataaataaatttataaagaatatcaatacgtatatttaatatggttgttaaatagaataaaataaaaagtagtattccgcacatttggtttaataaataaccaaaggaattctgaaattccccctaacaagtagctcgtgaaatagaaaaacagcccacactggccgggtacgtggctcacgcctgtaatcccagcactttgggaggccgaggtgggtggatcacctgaggtcaggagttcgagatcaacctgaccaacatggagaaaccccgtctctactaaaaatacaaaactagccgggcgtggtggcacatgcctgtagtctcagctactcaaggccgaggcaggagaattgcttgatcccatgaggcggaggttgtagatcgcgccattgcactctacaatggcaacaagagtgaaactccgtcaaaaaaaaaaaagcccacaatggcaggctatagagacaatgattacactgacagtactatccctcaaaacctctggggcttggccaaagtgatactcatgaaaactctcaccttaagaaatgcaattactaagcaagaaagaataaaaataaatgtgaaacattcaatctaagaaatcaggagaagaacaataaaataaacacaagaacaaaaagagaaaagatggaatgggaattacttctggtcaagatactgaaaccatccagtggttccagacagcgacctttgaggaaacccctggaaagggggaggggtgctcttacacacacacaggcacacacacacaccccacacgtgcacacaccccacacgcgcacacaccccacacgcacacacacgtgtcagggagcacgtctgacatgccccgtaagatctccagaagagattagacagaaatggaagaaagcagtgtttgaaaaacaatgactgagaattttaaagaatagaaaaacaaccagccaaccaacctaaaatttggtcctaaaatttaaaaaacatacagattcctgagcaggattcagggaaacaaatccacacttagacacaacaatggtaaaacaggagcacctaacagattgggagaaaagtctaaaaacagcttccccaggccgggcgcagtggctcacacctgtaatcccagaacttcaggaggccaaggcgggtggattgcttgagctcaggagttcgagaccagcctggccaacatggtgaaacctgtctctactaaaaatacaaaaaaaaaaaaaaaaaattagctaggctgaacccgggaggtggagtttgcactgggccatgatcatgtcactgcactccagcctgggcaacagacagcaagattccatctcaaaaacaaaacaaaacaaaacaaaaaacagcttccccaaaggcactgagatcagactgatggctgacctctctgaagacataagaatattatcttgaaaagaagttgagccgggcatgatggcatgcatctgtagtcccagctacttgggaggctaaggcaggaagattgctttagcccaagaaatagagactatagtgagctacgatggcaccaccatgccagcctgggtgtcagagcgagaccccatctcttttaaaaaaaaaagtagtagaaaaatgtcaacatacagaaaattctatttccagctaaaccatcattctagaaagtcatctacagatacatagcatgtactccccacagactcttgctgaaggaactgacaaagcaaagggcagagatccctgaataaaagtccatttcccttttctctttcctagaaaagatggggctgccttgtacctgagtctgagtataaagccttgtgtccgatcaactgctctccaggctcctggaagaccccactgtggtaaacagggaaccgaggtcaaggagcaggcctgggaagagcttcaatcaactgtttcataaaatgtgagcaaaagttattacttccaactcaatatattgttataagattttaaatacgtacgtgtcatttaactaataaattaaatgtaaatagatactttactatttatgcacatatgcctaataaagagtattgagtcagctgccaactattgggaaacaacaaagcgagatccctaatttgttctttttcactagatcatttcccgatgcattaaagactcagcaggaaaatgacatgacgataaaatacaagtggccccacagtaagccccctacatacacacaaaattaaagaagcacaaatttaaaacaggaaatccttttacctatttagattggccctccaaatcaattttatttcttttctttttttttttcttttttttttttttgagacagagtctcgctctgtcacccaggctggagtgcagtggcttgatcttggctcacagcaaactccacctctcgggttcgagattctcctgcctcagccgcccgagtagctgggattacaggcacgtgccccaacacttggctaatttttttttttttgtatttttagtagagacggggtttcatcatgttggccaggctggtctcaaactcttgacctcaggtgatcaggcggtggctcacacctgtaatcccagcactttgggaggctgaggtgggcagatcacttgaggtcatgagtatgagaccagcctggccaacatggtgaaaccccgtttctactaaaaatacaaaaattagctgggcatggtggcgggcgcctgtaataccagctacttgggaggctgaggcaatagaatcgctggaacccgggaggcggaggctgcagtgagccgagatcgcaccactgcactccagccttggcaacagagattctgtctcaaaaaaaaaaagttagctatcataaagaagtttactagaaacaacattttaaggaatcccagctttctacaggatcaaggaaatgccatgtgcagctgatttctggaaggcgcagagggagggtgagctccaggcactgcccactctgtgggcagaggggcctgcaggcagggtcccacagcacctgcctcctgcttccccctgcaggcccctgagtggggctgttctcactccccgccctggtctcggccggaaccctgtagcaggcaggtgaagctccttatctcagagggggcccaccatgtcacctgctggagttggctccacagtctgaatggggtgttggcaggaaccagtgtcaccagagcacaggggacgccccggcacctccccccacagccatctatatgggcaccggcagcatgagacaggctctatgcctgaaagcagccgagagccagtgaagtggcggtcagcttgctccctgcgggatgcggccccttcccagaggcggacaggtgaggacatgcactgaggcagctgcaggtgacccctgggccaccggtgctggggcagagtagctgttgtgaagtggactagagaagcatctagaaacagccacaggcagagcaggtcctgctcagccccctggctggacggctgtcccacgttgaataatgatgatatgtttgtcacagctggccattctgtactacttaatgattgcagccacatcatttatgaaccggataagtgatcttaggaaaaaaatgcagatagaccagtcagtcttgcctaaacctttgcaatcaggactcatcttttttatttttttaaatgtttttagagactggatctcctgtgctgcccaggctggagtgcagtgattattcacaggcaggatcatacccactgcagccccgacctcctgcgctcaagcaatcctcccacctcagtctcccaagtagctggaacttcagacacacaacaccatgcccagctaagaactcaatgtttaggtggggaggacggccttcccaaaaagaaacaaatggggtatgtttggtataatcaaagccaaaccaaaagtccccattcttctcttctcactctactttcttctctaaattgccaataaatcgacaaacttccattgagtcctccctatggatgtgtgcatgcatgcacacacacggtctaacatacaaatgcatgtgtgcacacagtctcacatacaaatgtatgtgcacagtctcacacacaaacgtgtgtgcacacagtctcacatacaaacgcacatgcacagtcttgcacacaaacgcttgtgcagtctcgcaaacaaacgtgtgtgcacacacacagtctcacatacaaatgcacgtgcacacacacagtctcgtctcgggaagtgctaggattacaggcgtgagccaccacacacagccgaggaaacatctctttagccagatttgggcctggcgacataggaactgaagaaggcagaaagtatctggcactcagcaggggctcctctactggatgggtggatggatatatggatggtaggtggatgagtgactggatgattggatggatgggtggatgggtgagtgaaaggatggataggtgggtgggataagtggttggataaatggatggataggtgggtgcatgggtaggtggatggatggatggatgaatggatagatggatgaatggatgggtggatgcaaagatagatgaatggatggatgaatgggtgggtgggtgggtggatggatgggcggatggatagatggatgggtgggttggtggatgagtgagagtggctaattggatacatgggtggatagatgaacagatggatgggtgggtgaatggatggatagataagtgggataagtggttggatggatagatggataggtgtatggacggatggacaggtgagtgtgtgggtaggtggatggatagatgggtgggtggacggatggatggatacattaatagatggatgggtgggtgggtgtacgaatggatggatggatgggtgggtggatggatagatggatggatgattgggcgggtgggtggatggatgggtggatggatacatggaagggtgggtgggtgaatggatgaatgggtgggtggatggatggatggatagataggtgggtggatggatgggtgggtggatggtagatggatggatggatgggttggtgcgtagatggatagatggatgggtgggtgggtgggtgaatagatgaatgggtgggtggatgggtagatggatggatggttggatgggtgggtgaatggatgaatgggtgggtggatggatggatggatagataggtgggtggatggatggtagatggatgggtgggtgggtggatgggtagatggatggatggttggatgggtgggtgaatggatgaatgggtgggtggatggatggatggatagataggtgggtggatggatggtagatggatgggtgggtgggtggatggatggatgggtgggtagatgggtggatggatggatgggtgggtgggataagtggttggatggttagatggatggatggatggatggatggatggatggatggatggatgaatagataggtgggtggatagatgggtgcgtggatggtagatggatggatggatgggtgggtgggtagatgggtagatggatggatggatggatggtagatggatggatgggtggatggatacatggatgggtgggtgaatggataaatgggtgggtggatggatggatggatggataggtgggtggatggatgggtggatgggtgggtgggtgaatggatgaatgggtgggtggatggatggatggataggtgggtggatggatgggtgagtggatgggtagatggatggatggttgggtgggtgggtgggtggatggatgggtgggtggatacatggatgggtgggtgggtgaatggatgaatgggtgggtggatggatggatggatagataggtgggtggatggatgggtgggtggatggtagatggatagatggatgggtgggtgagtagatggatagatggatgggtgggtgggtgaatagatgaatgagtgggtggatgggtagatggatggatggttgggtgggtgggcagacggatgggtggatggatacatggatgggtgggtgggtgaatgggtgggtggatggatggatggaaagataggtgggtggatagatggtagatggatggatgggtgggtgggtggatggatgggtgggtgggtagatgggtggatggacagatggatgggtgggtgggataagtggttggatggttggatggatggatggatgaacagataggtgggtggatggatgggtgggtgggtggatggtagatggatggatgtatgggtgggtgggtagatgggtagatggatgaatggatgggtggtggatggatggtagatggatggatgggtgggtggacggatggttgggtgggtggatggatggatgggtgggtgggtagatggatggatgggtagatgggataagtggttgcatggatggatggatggatggatgggtggatgaataaataggtgggtggatggatgggtgggtggatggcggatggatgagtgggtggatgaatggatgggtgggtgggtagatgggtagatggatggatggatggatggggggggtgggtgaatggatggatagatggatgggtggttggatagatggatggataggtaggtgggtggatgcatggaggaacagatggatgactcactgaaacactcagtcataaagccagtgccccttgcctttcttaggaagtcagctccggtgtctgtgtccaagatgcccagcctccacctcagtcaggagacactgctgcctttacctggagaagtctgcggccatcttcgctgctcaccacagagccgcacagaaatgccggctgctttgctaacctgcggtgttgttctcacaaatgctgccagcgaagtgggtccccagagcgcccgcagctaagatgaggtcctgctctgtgcagtggcctccgaccaggccccgctcacaagaggggcttctgtgctccttcgggccttcctgagaaggctgcgtccagagccctcccactgaccccaggcgcacacccagaacctgacccgcacccagaaccaggcgcacacccagaacctggcccgcacccagaaccaggcgcacacccggaacctgacccacacccagaaccaggcgcacacccagaacctggcgcacacccggaaccaggagcacacccagaacctggcgcacacccagaaccaggcacacacccagaacaaggcccacacccagaacctggcgcacatccagaaccaggtgcacactcagaacctgacccgcacccagaaccaggcgcacacccagaaccaggcgcacacccagaacctggcacacacccagaatgtgacccccacccagaaccaggcacacactcagaacctggtgcacacccagaacctgacccacacccagaaccaggcgcacacccagaaccaggcgcacacccagaacctgacccacacccagaaccaggtgcacacccagaacctgacccgcacctagaaccaggcgcacacccagaaccaggcgcacacccagaaccaggcgcacactcagaacctgacccgcacccagaaccaggcgcacacccagaacctggtgcacacccagaaccaggtgcacactcagaacctgacccgcacccagaaccaggcgcacacccagaacctggtgcacacccagaaccaggcgcacacccagaaccaggcgcacacccagaacctgacccgcacctagaaccaggcacacacccagaaccaggcgcacacccagaacctggcacacacccagaacctgacccgcacccagaaccaggcgcacactcagaacctggtgcacatccagaacctgacccacacccagaaccaggcgcacactcagaacctgacccgcacccagaaccaagcgcacacccagaacctggtgcacacccagaaccaggagcacacccagaaccaggcgcacacccagaacctgacccgcacctagaaccaggcacacactcagaaccaggcgcacacctagaacctggcacacacccagaacctgacccgcacccagaaccaggcgcacactcagaacctggtgcacacccagaacctgacccacacccagaaccaggcgcacactcagaacctgacccgcacccagaaccaggcgcacacccagaacctggtgcacacccagaacctgacccacacccagaacctgacccgcacccagaaccaggcgcacacccagaaccaggcgcacacccagaacctgacctgcacctagaaccaggcacacacccagaaccaggcacacacccagaacctggcacacacccagaacctggcgcacacccagaacctgacccgcacccagaaccaggcgcacactcagaacctggtgcacacccagaacctgacccacacccagaaccaggcgcacacccagaacctgacccgcacctagaaccaggcgcacacccagaaccaggcgcacacccagaaccaggcgcacatccagaacctgacccacacccagaacctggcacacacccagaacctggcacacacccagaacctgacccgcacccagaaccaggcgcatacccagaacctgacccgcacccagaaccagatgcacacccagaaccaggtgcacacccagaacctggcacacacccagaacctggcacacacccagaacctgacccacacccagaacctggcgcacccccagaatctgacccacatccagaacctggtgcacccccagaatctgacccacatccagaacctggcgcacacccagaaccaggtgcacacccagaacctgacccacactcaggccatggcctccacttcccggactcactttcgggtcggcccagctctgcacggagcctgttccccatctcgatgagctgctctttctccaggcggaggctgatgatttttctggctgcctccttcagctttctctggagtcggtgcatagataaggtctggggggcacgtgccactgaccggaggtgcaggaaaagctccccctggtcctcggcctccataggccctctcttggtgaggccctgtaacaaaactcacaggcagacacccctgtgaggctgccctcatgggaggacgccaggggtgcccacccaaggagcctcttcacctgctcttccagggtgggcactgctggctgtcactgggtgacatccttccaaaagaaagacaaaaagagtcgctgctcccagtgcttcagtgggttccttctcttccacaaatagaataaaggcccacagatctcccaggccagggtggcccccagatctcccaggccctcacagccctccgcctcctccccgccatccctgccttctggtcatctatgcctttgtgtctttcaagtgaacacaaggagaatctgaggacacccaaccagcacagcagctccccagggagagcagagagaaggctgtggcctccagcagtgcccaggacccaggaaggcggcccagggagagcagagagaaggctgtggcctctagcagtgcccaggacccaggaggacagctcccgccagcgtggcttggccctcctccactccttggggtccctcctttctctacctgccagctggacaccccacaaccaccctgcaggccggctgtggcttccctcctgaagcaggtgcagggggagcacaaaggcagtggagagggaggaggccgacacaggggcaggagctggctgggctcccccttagcaccccaagcctgggtcaaccctagatctgagcccctgggaagcactgtgttgtcctcactcagcccaacctggacttgcagcccacatcattccagtgctacagagtgcaatcccaacacaaagggatgcctggaccaaaaatgggggcacaggaaaaagcagtagtgtccaggccctggcaagacgggagccgacgacctacttctcccgtgccactcctggcccctgtaaggagccaggctgcacctggccctggccacatgagctccgagttcctggaacaggccagcacaccctgtccccgccagcttcctggtgtgcctttccagggctggcaggtgctgctgccttccaggtgctgctgttctttggatggcctggggtgcagccactgtatgcagtgcctccgggcatgtgccgcaggttcatgtgggacgctcgggggccgcgggggatgacacatcgaaggggagagatgtctgctttcctcttggacagagaaagttctatggtgccgcaggccccagctgaggacgggtgcagggcagcccccatgaaggctcgccacaggcctgagcccgagtccagactcgcttcctccagtaagcgggcctcatgcctgctccgtgagcacccttggcaagtgtggtgcagaggctcactcaccaccctgggagaatagacaggaatgggctcttgggtgtgggagaggccaaggcagagggagaggaagggaggcctgtgctggtaaaacagattgcagatggcctggggctgggggagaggggccaggcaggtgagactcgcaagtccggttctaaaaccctggatcctctacaggaacacactgggttattttgttattttaactgaagaaagaacaatcccgaaaacagattttgcaaacctcaaaacacttagagatttaagagaaaattccgtcttcaaaagcagtcccctctccctgcaaagttacaccaggccctgcggctggtgccaggcttgaggggcactgaggggccttcttgctgttgaccccacaggcaaaggaaggagggcatggatcacagggcccatgtcctagtcacgtgattctgcacacagtgacctggggggcagggagtgaacgattctacttctctcggattcagtttctggtaaaatgttatttggtaaaagtttattttgatgattctctaaaatctttccacaaaataagatttctacagcctgagacatattcaggaatgtcttcaccactgtgtgctccaagggctgcccacccccagcagggcagcagcagctgtccacccatctgcccccacgcctaggactgccccagcaccccacaggtgaggaggagatgtctccaagtatctggacgattcgaagaaaattcgaaggaaactttggtctgctgaaatgtcttcacgtcctgaggacatgtatgagtgagtgacacagggaagtccttctcagaggctgaggcctgggcctggtacagtgggttccatcaggctgggccggcgctcaccgccccacacagccactccaacgcctctcggcagagccagcaccaacaccatggccaacactgccccccagtggacccagggatgtaacacatcccccaactcagccctggcggccagtgactgggggaagttttgtattttaagggctagaggcagctgatgtgggtggtgcagtcagggaagcccaaagccaggctgtgcggctcagcccagtgggacctgcctgggagcagagtgccccactgttgtccacaggctctccctctgccatgggagaagtgggaacacgtgcctccgcacacacctggtcccagctttgcagacctggctccttggctagggccgtggaaggggaccagctttcgtcaggagtgctgtgggacagtccctggacccctgtgcacttcctcacccaccctgcactggcttcctgcactacaggaggtaggctggagacgcagtgccgcgtcacacctcagtacttgggtgggtgtacacaatacgtgacctggtccgtggcccgtgtgcaaatgtcaccaaccgtccagataacgccctgacgccatctctcctgtgcagggtccagggtcccacgtggcatttctacactgtctctcctgtgcagggtccatggtcccacatggtgtttctacagatgatgccctgacaccgtctctcctgtgcagggtccagggtcccacgtggtgtttctacggatgatgccctgacgccgtctctcctgtgcagggtccagggtcccacgtggcgtttctacggatgatgacttgatgcccgtctctcctgtacagagcccagggtcccacgtggcgtttctacagatgatgccctgacgctgtctctcctgtgcagggtccagggtcccacctggcatttctacatggggtctcccaggtctcctaactggagtggctccccagcttccatgtttgggcactcgccaagcatctagacccgctcatctgcagatgtccctctgtttgggcttgcctgaggtctcctcatgcataagctcaggttctgcatttttggcagggaccccgagcgcgagtctgtgccgtctcagtgcgacccgcccagaggcgcgtgacacgggcgcatcccagcactggcgatgggagctctgatcactcgggtcagctggggtcaaacaggctgctccactggaaagccagcatttcccttggaaataagaagtcacgtgtggggagatgctgcttcgcatccgtctgatgggaatccctctggttcagcacccatccgtggtcgcccggcgcgccgttcctgtcgcgttccttggctggcactctcgcgtggaagagtgccccgttcccctgaccgatctgtccattgctatcagcctggacccatgatttcctggttgagtcagtggattgtggtcttcaacgtcactgcctattggcctagttctggtccttggggacccctttcagctgcttcctgtgccttccgaacctgcctccatgctagagcccgggctcctgtgagcagggcaggaaccatggaactagcgcctggaactgtggaactggcatctgctgtggctgagtccgggctgtgggccctctcaggacagagctgggatcagatgcacatgcagctctacccacttctctctatacccaacataacggacacattgatcctctacctgagggtccagccccaacatggccccttctccgtctgggctcctttcccagcagcaagcagcaaggacctgggcccgccctcgtctccaggagctcagccatgctgcttggcagaggacagagcccaggtgggcctcgcctgggtggagagcccggccacaggatgctcagacccaggaggagcctggagcccgactgtcgcctccatgcatgtagacacagagcctggagtgtatgccccgcctgtgccttagctccaataactgggattgggctgcaggtggcttcatctctcaatttaaaattctgcttatttgggccaggcacagtgggccactgtgcctataatcccacctgtaatcccaccactttgggggactgaggcaggcagatcacttgaaaccaggagtttgagaccagcctggccaacatggtgaaaccctgtctctactgaaaacacaaaaattggccgggcgtggtgcacctgtaatcccagctactcagggggctgaggcgggagaattgcttgaacccgggaggaggaggttgcagtgagccaagatagcgccagtgcactccagattgggcgacagtgtgagactctgtctcaaaaaaaaaaaagaaagaaaaaattctgcttatttgtataaattcttgccccttcattctaaacaagtgggaagacagtgaactacgcaagggccaacagtgagagctcctggggccccttgctgcccaaggaggcgcccgcccgtgtccgggaacacatggcgctcaggtgggtgggagatgtgtgggggtacagacatgcttacccctggctgtgctgccagctggcccaagggccacagcccccaccgggcaggagccaccctggagtggctggactgggagcccaggagggctagggtgctggagacccctgaggacaagacctccttaccaacaggtacaggggcaggtgcagctcaatatcttaccgaccagctcagcccttcctgtgcgcactggctgagcacctgctagggcctcaggctccctcggccttcccatacctgccctgttgtacccctgaggcatccttatggtcttgcccatcccatgccaaggcagctctggcctgctcctcactgtcctggagcctgagacagccacggccgcatcttcctcagtccactctattccagcctgagtccctggggatctgctccccaagcacggtgccctggggatccacgctgtcttccactttgtgctttccagacatcatctactgtccccaaaaccttctgtggattcataggtcactattggtaactataggttaccacaggtcataggtcactacagttatcccagttaccaacagtctagggtacgaagtcagggaggccgggcagcctgtccttcacagcctttccctctggccttaggtaggaagaagggggccctgctggtcggctctgccaagctgcagaatcaggacctggggtcgtctccacagctcagagctgtggctcaaacccagccatggagttgggggtcactccctcggggccaagggcctgaccaaaaccaggataggagtgccatggcctggagcagctgtgtggctctgaacgcagcagtgagggccatgtgggcccctccccacgcagggagggcccaacgctaggcatggggcaggcatggctgtgcacgcagacgccccctcagcaggccgtcaaggccctgcattaaagcaaacatgagccaccttcagtgtgtgcgtttccaacacaagatgctgttagctgaagggaggactgggatgggcccgtcccgccccccaccaacggggcatcaaggtgaaggaccaggagaagaggaggcgtgtggaggaagaaggcggaggaatggggagagggggtggagcagggcccacttccaggcacggccttcactgcagccctcgtcccacctgagctcccagggcatacagacagcaacgctggcagagcacaggcaaggacggtttctgtggcaggaacctcggcgggtggcaggaggagctagcgggcacccacctctctcccaagggccacggcgtccgaggctgggggctgcttcctgcctgaaggctccgctcccccgtgctgggctatcctgagatgcttccccagctcagccacctgcttccgcagctccaaaacctccaggtgtacctggtccacctcacggggaagctcacgctggagagcggccggctccaggggttcccgcagcacctaggggtcatttcaaaggcagtgtgaggaatgaggcagtggctgggctggagcaggcccctgggcactgacaggaagcgctgtgagtgccgggaaagaacggggagcccggggtcagggcctcctccccagctggatgcaactgccctcagccctctgcccccaaccacggccactgctcctcctgccccgcccagctggccctggcagttcccctgtgccctgctctggactcctaggctggtggggagaatccgtgcatggactgaggcagagcgcctcgaaaccccttcctgagcctcctcccagggagaaacaaaggcctccagaattgcaagtaaccggtaggaggtgttgatttttcttttctgctaatcaaagggggcagacatggggaggccagaggtaaacaggccaggaagtcggagggctgaggctattgaaaggcaggtggataggctgggtgcggtggctcacgcctataatcccagtgccttgggaggccgaggagggtggatcacgaggtcaggagatcgagaccatcctggccaacatggtgaaaccccatctctactaaaaaataaaaaaaattagccgggcatggcggtgggtgcctgtggtcccagctacttgggaggctgaggcaggagaatggcatgaacccgggaggtggagcttgcagtgagccaagatcgcgccagtgtactccagcctgggcgacagagcgagactccatttcaaaaaaaaaaaaaaaaaagcttgtattaatttttatttatttacttattttattcagacggcatcttagttggttgcttaggctggtctcaaactcctgggctcaagcgatccttctgcctcagcctcccaaagtgttgggattacacgtgtgagccaccgcatccagcctatttctatttttagagacagggtcttgctcttcgcccaagctggggcagagtggcgcgatcgtggctcgccgcagcctcaaccatctgggctcaagcaaccctcccactgggctcaagtaatcctcagcctcctgagtagctgggactacagacgcaccaccatgcttggctaattatttcagtttttattacagatggggtcttgctgtgttgcccaggctgatttcaaactgctgagctcaaataatcctcccacctcaccattccaaagtgtggggattacaggcatgcaccaccgtgcccagccttgtttagtttttgtagggacaaggtctccctatgttgcccaggctggtctcaaactcctgggctcaagtgatcttcctgcctcagactcccaaagtgttgagattacaggtgtgtaccaccgtgcccagcctaaaagctgtatttaaatgtttatttcttgtctgtagcatttgtgcgggaaatgggggaaacagcaactgcaaagcatcggggatctggagccccttcacgggcacatggatcttcaactccctcgactggagcccctcacgtgtacatggatcttcaactgcctcgacagaaatggaaaagtggccaagttcctctccattgcaacaacaaggacacacttccaatcaaggcgaggcgttaggcatcagcagaaaatgagaggtatgagggtaacgcacatgttaattagcctcatttagcccttccagtgtgggcatgtttcaaaacatcatgtcgcataccatagagatatacaatttatatttgtcattttctttttttttttttttgagacggagtcttgctctgtcgcccaggctggagtgcagtagcgcgatctcagctcactgcaacctccgcctcccgggttcaagcaattgccttgcctcagcctcccgagtagctgggattacaggcacgcaccaccacacccggctcatcttttgtattttagtagacacagagttcatcatgttggccaagatggtctcaatctcctgacctggtgatctgcccatcttggactcccaaggtgctgggattacaggcgtgagccacctcgcctggccatatttgccattttcaatcaatccatcaaacatcttaggaagattaaaaaaaaaaagcatccaatttctggagcactgtgcactccctgggcagatgggaaatctggaatactttgtttctagagagatgttctgcgttagagaagaagcagaggctgcagggaaggcgtggtttatgtatttacaatgcgagaggacatgtggaagttcccttgttatgtcgcctcacaaggaataaaagcaacaggatgaggacagcatgactcagaagcacaagcaacaggagacatgatcaacaggactggatcaaaactggaaacattcggtgtccttcaaaggacaccatcaggaaagtgaaaagacaggccaggtgcagtgactcatacctgtaatgccagcactttgggaggcagacaggccaggtgcagtggctcatacctgtaatctcagcactttgggaggcagacaggccaggtgcagtggctcatacctgtaatcccagcactttgggaggcacacaggccaggtgcagtggctcatacctgtaatgccagcactttgggaggcagacaggccaggtgcagtggctcatacctgtaatcccagcactttgggaggcagacaggccaggtgcagtggctcatacctgtaatcctagcactttgggaggcagaggtgggaagatcacctgaggtgaggagttcgataccagcctggccaacatggtaaaaccccatctctaccaaaaatacaaaaattagcaggcgtggtggctcatgcctgtaatcccagctacttgggaggctgaggcaggagaattccttgaacccgggaggcggaggttgcagtcagccgagatcacgccattgcactccagcctgggcgacacagcaagactctgtctcaaaaaaaaaaaaaaaaaaaaaaaaagagaaagtgaaaagacaaaccacagaatgggagaaaaatgtagcaaatcatatatctaataagggacttgtatctggaatataaaaagaattcttacaactcaaataaaaagacaacccaattaaaactgggcaagggatccacacggatgtttctccaaagaagacaaatggctcaaatggctgaccaagacgcacatgagacgatgctcgacaccaggagtcatcaggaaaatgcaaatcaaaaccacagcgaggccccacttcactcccaccaggatgcctagcatcacagccagaaaacagctagtgttggtggggatgggggaaccggaaccctcacacagtgctggtggaggtaaaatcgtgtggctgctggggaaaacagtgcggtggctcctcagagggttaaacacagagttaatgtctggggaaaacagcacggtggctcctcaaagggttcaacacagggtgaccgtctgacagagcaattccgctcccaggtgtacacccaggagaactgaactctgcataagtccacacaggaacttacacaggaacattcacagcagcattatgcacaatccaaacagcggaaacaacccaaatgttgagtgcatgaatgataaacaaaatgtgattcctccatacaatggaatatgtcagccatgggaaggaatgacgttctgacatatgcagagctgaaccctgaaaacattctactcaatgaaagaagccgggcacaaaaggacaactaccataggactgtgttaatatgaggtccctacagtagacaaattgattgtgacgggggtggaatacttactagaagctgggaagcagggaaggggtgacactgctgtgtggttattgtaccgagcttctatctggggtggggagaaaagctccggtaatagtgagaatgtttatgcgacattgtgaatgtgcttaatgccactgaaaggtacactttaaaatggccaaaatgaatagtgagaatgtttatacgacattgtgaatgtgcttaatgccactgaaaggtacactttaaaatggccaaaatggtaaactttgttatatattaatgaattttaccacaattaaaaaaattttttttttgagatggagtttcgctcctgttgcccaagctagagtacaatggcacaatctcggctcactgcaacctccgcctcctgggttcaagcgattctcccacctcagcctcccaagtagctgggactatgggtacccgccaccactcccggctaattttttgtattttatagagatggggtttcaccatgttggccaggctggtctcgaactcctgacctcaggagtggggtgatccgcccacctcggcctcccaaagtgctgggattacaggtgtgagcccccatgcctggccacacaattttttaaagtaaaagccaaaacgatgttaggaatatgtagcagtcaaaccgaggtagtgaccccagccccatgggaaacagggtgggctcgctgctggatgcagatactggtcccagcaggagtaggacccgacccccaaaaggcaagggcccaggaggttgaaaagaacagcgcttgccggggccctagtatctcagatgaagtgtggctcaacactgacatggagcacatgcgtccggttgaccaggacccctctgagcgggcaggtggcatcgggcagcccgcacacacgccccactgaccaggacccctctgagcgggcaggtggcatcgggcagcccgcacacacgccccactgaccaggacccctctgagcgggcaggtggcatcgggcagcccgcacacacgccccactgaccaggacccctctgagcgggcaggtggcatcgggcagcccgcacacacgccccactgaccaggacccctctgagcgggcaggtggcatcgggcagcccgcacacacgccccactgaccaggacccctctgagcgggcaggtggcatcgggcagcccgcacacacgccccactgaccaggacccctctgagcgggcacagccagggcctggtgttctggccgccagtgctgcctccactgcctagaccatgcttcccaggttctcatggcacgccttccacgagcacacctgagatgaaccggttcctaggacctccccacagccccttcctcagaaaaaaacaggcagagagaggtcagtggatgcccgaggtcacctggggtcgcaccgggcagccgctcagagcccacgcgctctcccccagcagcggctctctaggaggatgaccccacaaacttgactgcctcaccttctgtctgagtcgtgtcaccagcaggtttaggagctgcactctgtccccgagcttcctgagtgccagtccagaggatactgggccagcttggacagatcctcctgcttgaccagcttggacagaccctccggcttgaccagcttgggcagaccctcctgcagagaagagtggcttctgtcagctcatacctgagaacaaaggaagacctttctggggagacacacatctctatcagctctccctttcccgtgaggccatggcaccagcggctgaccccaatgcgaagctgttcttcattggagtcagcagatctggtccacgtgaagattagagatgctgtacagaaagcataatcctcatgtaaagaaagcaagaatccttgtaggaaaaagtctgaccttaccacgtaatgtctgatagagaccaattgctccagtctgtccaagtaaagagccacttgcttggaaatgaagaaaaaagatgccacataacacagggtcaaagaaaaaaatcacaatggacattaacaactattttgaatggaaagataacaacaatactaccttagaaacttcaggaatgaatctaaagctgtccttccaagaataattacagctttagataaatattttagaaaagaagaaaggccaaaaaccaatgagctaaacattcatctcaagaaattagaggggccaggtgcagtggcccatccctgtcatctcatcacgttgggaggctgaggcaggaggatccctcgatcccaggaattcaaggttacagtgagctatgactgagccactgcactccagcctggataacagagcgagaccctgtcacacacacacacagaaaaataaatttaaaaagaatgaccaaattaaagccaaatagggccaggcacggtggctcacgcctgtaatctcagcactttgggaggctgaggtgggcagatcgcctgaggtcaggagtgggagaccaacctggccaatgtggcaaaaccctgtctctgctaaaaaaaaaatacaaaaattagccaggcgtggtggtgcgcccctgtggtctcaactactcgggaggctgaggcacgagaatcgattgaactcgggaggcggaggtggcagtgagccaagattgtgccactacactccagcctgggtgacagagtgagactctgtctcaaaaaaaacaaaaacaaacaaacaaaaaaacgccaaataaagtaggaggaagaaaagataacgttagtattagatactgaggaaacagaaaataaatgtataatagagaatcaacaaaatcaacagttgattctttgagaaggctaaaataaacacccaataatactaagcaaggaaaaaatagaagcaaatgaccaatataattaatggcaaaaaggagtcaacacttcagatcccacagacatttaaaaactcataggatactataagcaactttatgtcaaaaatttgaaaatttagatgaaatggacaatttcttagtaaaatataacatcaaaaatgtacaaaaaagaaaatccaaatgtcctacaactatgaaaaaaactgaatacacaattttaaaccttcccacaaggaaaactccaggcccagctggtttcaaagttgaattctaccaattatttaagaaaaattaatataagtctgatacaaacttttttagaaaacggaaaaatagagaatactttccaacatatttatgaggccagcgtaactctgattccaaaacctcccatgaacattatgagaattgaaaattatgggccagtcttactcatgaacataaatgtgataattctcaataaaacactggcaaaccaagctgggtgtggtggctcacacctgtaatcccagctacacaggaggccaaggcaagaagatggcttgagcccaagagttcaagaatagcctggtcaaagagcgagactgtgtctcatttaaacaaaaaacaaaagaagtatcagcaaaccaaatctgtcaaactataaaaagaagaatctatcactacatgttgaattcatcccagaactgcacgggcggtttaacccgacggagcccctacagtccacccgcattttgcctgctaatctcagctaaaggcccagccagaacacaaaaagcctcactaggggaaaattctgaacagtgagaaatgaaggctgagtgtctaggggcctcggatcccaggggtggctggcaaggagtccctcgtctccttcctgcacacactggcctggtgctaggcagccacaacccagagctcagaccaaaaaaaaaaaaggccgaagagaagctgctcctgggaccaacggagcaagaagacggggacgtgcaggtggagcccttgggaccacacctgccctcctgccagcccatggtcctgcagcctgctgtggacaaaggccagctgggcttctgggagagcatgtggggagggtcacaggaggaaggaggtctgcgtgaagacccctgaggagctgccgtgtaaaaccagccagaatccacagaaccagcacagcaaaacctctgacaaccgggcctggcgggggacactgcccaggatttaactggccacttggtagctcatgtatgggcagaggaaaatagcatcatcaaggctctggaaagtaatggacattcaaacctcagcccaccagagcgggccaggatgcgcagtgtgaacccagaaaggctgactacctgacaaaagaaaagacagaattaacatagatttaataagaactggaatttcataatgtgacactcaaaatgtccatgatacagtaacaaattacaggaggctgcttgtaattccagtactttgggaggccaaggcaggaggatcacttgagccaaggagttttgagaacagccttggcaatatagtgagactccatctctgattaaaaaaaaaattactcgtcatattaacaaccaagaaaatctcaatgtgaatgaaatagacaacaccaagatgacacagacattggaattatgggatgaagattttaaagcagcagtcataacaaaactccagcaagttactggggagggtagaggtgagagaattgcttgaagccaatagtttaagatcagcctgggcaacatagtgaaaccccatctctacaaaaaaaaaaaaaaaattagctaggcatggaggtggtatgtacctataaccccagctcttcagcagtctgaggcaggagggtcacttgagcccaggaggcccaggctgcagtgagccatgataatgccgttgcactccagcgtgggtgacagatcgagaccctgtctctaaaaaaaacaaacaaatacacaaacaaaaaactccagcaagcaatttaatacactctaaaacttatggcaaaatgaaagttccagtaaagtaagatataaagaaaactaaggccaactgtgatggctcatgcctgtaatccaaacactttgggaggctgaggcaggaggatcaattgaggccaggagttcaagaccagcctgggcaacatagtgatactccatctctacaaatataaaaagaaattagctgggtgtggtggtgcacacctgtagcctgtagtcccagttacttggcaagctaaggtgggagggtcccttgagcccagggggtcaaggctgcagtgagctatgaccatactaccacactccagactggacaacagagcaaggccctgtctcaaaaacaacaaccacaacaacaacaacaaaaaaaaaggaaaaagaaacccaaaatggaaattttagaaacagaaacaaaaatctcactgaatgggctccacagcaaaatggaaatgacaaaagcaagcactgataaacctgaagaacagaggaaaagaaactgtccaatttgaacaagagagaaaacaaattgaaaagaaacaaaacacagcctcagggaccagcaggacaataacaaaagaccaaacgtttgtgtcctcagagccccagaaggaaagagtgtggagccgaaaaaattacttgaaaaataatgaatgaaaacttctgaaatttggtgaaagacataaaccttcagatcaatatcaaaaagaataaaccaaagaaatctatgcccagatacaacataatgaaatttctgaaaactaaagacaaaaattcttttttttttttttgagatggatttttgctcttgtagcccaggctggagtgcagtggcgcgatgtcggctcactgcaacctccacctcccgggttcaagcgattctcctgcctcagcctcccaaatagctgggatcacaggtgtccaccaccatgcccagctaatttttgtatttttagtagaaatggggtttctccactttggccaggctggtcttgaactcctggcctcaagtgatccacccgcctcagcttcccaaagtgctgggattgcaggcacccgcaaccacacccggccaatttttgcatttttaataggggtttcaccatgttggtcaggctagtcttgaactcctgacctcaagtgatccacccacctcggcctcccaaagtgctgggattacaggtgtgcgccaccgtgcccagctaatttttgtatttttagtagatacggggtttcgccatgttggccaggctggccttcaactactgacctcaggtgatccacctgccttggcctcccaaagtgctgggatgacaggcatgagccacggcgcccggcctgtcaacgtaattttaagagttaagtgtgaaagaatgtctatcatattcatccttgccattagttttccttcactcctgacattcctagtttccttccttctgttgtgtctaaagtacctcctttatcagttcttttagatccagtctgctggtgacaaacttttccttcatctgagaatgtctttattcactctcattcctgaagaatatttttactgaatgtataattatgggttgacagttttttgctttcagtacttgaaaaatattatgccacttccttctgaggagaaatctgatgacagctgctgctgagaacccactaccgctccagtcactgtcccctgtgggctgtgcatcgctctctctgtgtgctttcaacagtttttgtctttaggccgggcgcagtggctcacgcctgtaattccagcactttgggaggccagcgcaagtggatcacctgaggccagaagttcgagaccagcctggccaacatggtgaaaccctgtctctactaacaatacaaacgccaccagctgggcatggtggcacatgcctgtaaccctagctactttggaggctgaggcatgagaatcgctcgaacccaggaggcagaggttgcagtgagccgagattgtgccactgcactccagcctgggcaacagagactccgtctcaaaaaacaagaaattcatttcaaatataaaagagagaggtaggtaaaaagaaaaagggatgaaaaagttataccacgcgaatgctaatcaaaagaaagcccgagtggattaattaatatcagacaaggtagacttcagaacaaagaatgttgccagacaaagaggaagattacgtaacaatataagggtcaattatcctaaaaaaaaaaaaccctaaatgtatacacatctaacaacaaagatacaaaatatatgaaacaaaaacaaagaatcgtgatttaaaaaataaagatctatattaaaacaggaatagaaagaaacttccttaacctccctccactacccccaccacaaaaaaccttcagcaaaaactcaacctaaaaaagtgaaatgctgaaagttcttcctctgggattagggagaaagacagctattatcaacatcataccggagagtttagctaggggcgataatgcaagaagaagtaaacaatatcagcattggaaaagaaaaataaaacctcccttattttattttactttattttttttgagatggagtctcgctctgttacctaggctggagtgtagtggtgcaatctcggctcactgcaacctccgcctcctgggttcaagtgattctcctgcctcagcctcccaagtggctgggattacaggtgcctgccaccacgcccagctaatttttttgtatttttagtagagacggggtttcaccatgttggccaggctggtctcaaactcccgacctcaggtgatccacccacctcggcctcccaaagtgctgggattacaggcgtgagccactgcgcccggcaaaaacctcccctatttgagacaatctgtgccagtggagtgtcctgtctggcccctccctttcttttcctgccttaggcctgcagatggggcctgcctcccctacactaaggggggctgtggctccagcagggtgaaggcatctgtgtggaaggcagccaggctgggctgtcaagctcggtgatgctggggaggcatccaggcaggagaggggcctgcaaataggggaaggggccacagcagcaatgggggattggttacaccaagaggactcgatcaaagtaactgtgttagtgataatgggcgagccaggtttctcattattgggaaaggaagttagaataatgaaaaagaaagctagaatgctagaatgaaccttttgatgttggactaaccacaatggaatagattagcctatgagtttgtcttgaaattaagaccttccattcaccaaagacaccagtgaaggaataaaaggcaagccatagactgggagaagatatttgcaacacatataaccaacgctaggctcatattcagcataaaataccctaaaaaaatctatgacaaagggcagatgatccaataaacaatgggcaaaagacatggcctggagctccaaaagaggggctgtcgaaaggccaattctatggactgagctctgccccccaaaatttacgggttgaagctctcaccccgaacatgactgtatttggagacagcgcctctgaggaggcagctaaggttacatgaggtcctaaggctggggccctggactgttgtccttacaagaagaggaagagtcgggcgcggtgtctcacgcctgtcatcccagcactttgggaggctcaggtaggcagatcacgaggtcaggagttcgggaccagcctgaccaacgtggtgaaacctcatctctactaaaaatacaaaaattagccgggcgtggtggcatgcacctgtaatcccagctactcaggaggctgaggcaggagaatcgcttgaacttgggaggcagaggctgcaatgagccaaaatcatgccactgcactccaccctgggcaacagagcaagactctgtcccaaaaaaaaaaaaaaaaaagaggaagagacaccaggagtgagcatgcagcgggggaggagtcacgtgagcacgcagggggagagtccacatgagcacgcaggggagagggtgccgtctgcaagccacagagaggcctcaggaggaacccaccctgccggcaacctgatctctgacatccagactccagaagtgagaaaataaaaccgttgtttaagccactcaggctgtggtgttgagttacggcagccctagccaatcatacgccaatgcacacaggaagagatgttcaatcccacgaatctcatgaatttgcaaattaaaccaaaataggatgtgctacgtgtccactagagggaacagaaggagccgctgaccacgtaagtgttggcgcgcatgcagcaccacggctacctcgcacgatgtggatggatgctttggagaagaatctggcattatcaagtgaaacacagtgtaggtctgaagacgccagacagaagcacaggtgccacagaattccattcacaccaaaacagggagcgctgactgcagtgagcagccagggcacgtgggctccggagggagcacaaggaattccattcacaccaaaacagggagcgctgactgcagtgaggagccagggcacgtgggctccggagggagcacaaggaattccattcacaccaaaacagggagcgctgactgcagtgaggagccagggcacgtgggctccggagggagcgcgaggaattccattcacaccaaaacagggagcgctgactgcagtgaggagccagggcacgtgggctctggaggtagctccaggaattccattcacaccaaaacagggagggctgactgcagtgaggagccagggcacgtgggctctggagggagcacaaggaattccattcacaccaaaacagggaacgctgactgcagtgaggagccagggcacgtgggctccggagggagcacaaggaattccattcacaccaaaacagggaacgctgactgcagtgaggagccagggcacgtgggctctggagggagcacaaggggctgctgggctggatgacgccgccccaacgtctgcagtagccttgagctgtatatttgctatgagcggacttttgcaggggtcagatttcagtttataaggggacagcaagtaccccactgagacgcggacttaccagtcgtctctgtcgaggtgcggacgctgggctgagactcagcatgaggtgaggacatctttaaaggatccaacacatcttctagatgcttttccagagttttaaacttatgctttagagttcgtatttctgcttcaagggccagaacataatctgccaaaaaaacctccagtgaatataacacatacacagcatcctttcgcacctccctcctgtgagcaccagctcagggagccgatgccagctcatgcccgccagcttcactgtccctgtcctcctcacactacagcttcaccgtagtttccacactctctgtgtgtgtcagactgaaagaccttccctcccctcactggccagagtgtgccagccagagaccagcacagtctccatgctctccaggaagggctcagtgatcaggagcaaatgctccacctgccgccagcccacgtgcctctgtgcagaggggccaagtcccatctcgagaacggaagctctgcctccatcccggcatctgcccacccacagccactcatggggtccctgggggtcgggaggccctcatcagctctgccacagacgctcctctggaggaaaggactgaggtccaccagcccctgctaccaacccattctgggacagcgcgacagcaagccagccctggtccaggtctaaaacaggtttttaagtgtgtcaagcaggtaccctcattttttccttccactttacaaatataaaagctttttggtataaaacttaagatcccttctcttggagaaaaagcagttttcatactttgagtttattacaggggatgttaacttataggactctgaaatgaagcctccttgaagccagtcaagacccatgctcccgtctgtcctcctccctccctctcccccttcctctcccgctctgtccgtttctcccacttactcaccaggagtggcggcatctcccccagcctctgggtcaggctggtttgcatctgtgctctctgccgctgtctggatgggaggaggaatctgatggcttagagcctccatttctttcctcatctgggcaatcgcgtttcgcaagctcgtgttctgctctcggagccgctggatctcactggatggaaagtctttacttatttcttcttcatgctgcctgagaagcatctgtcaaatacaaggaaaaatggctacaaaaagatgaatggttccccagcttgtcctgacaggctgtgcctccgctctccccgcgcccctctcgggccggtcccccgcttcagcttgggctgtggtccctccccatccccaggctgtgatgcccctcctttctgacagaagtgcaaatatgacactcaaattcctggagcctttcatacttttgagatccctagagtgtccaatccacagaggcagaaagtggaatgggggtgctggggctgtgggcggggagggggagccagtgtttcttggggacagagcttcagtatggaaagatgagaatgttctggagagggtggtgtgatggctgcacctccgtgtgaatgcgcttcatgctgctgaactgtgtgcaccaaaaaatagttaaagcagccagttttgcgttatgtatactttagtacaatcaaacatccactaaataggatgaagagcaggttcagagcgcgcagaagaaaaggcagtgaatataaacacctggcaacagaaaatacccaaactgaagctcagaaggaaaggtgccaaagaagaaaaaatgagcagagctctggagaccatgaacaaggtgcacaaggaaccaggagcccagatgaacgcaaagacaggagacgcgtctacaacaaggccagacatgttacaaatgtgctgaaagccacacatcacagatgacgaagcaaatgagctgaaagccgacatcacagatgacgaagctcagtgaaccctaagcaggataaacagaaagaaaatcataccaaacagcacataatcaagctgctgaaaaatcagcaacaaaatggaaactctaaaagcaacccgagaaaagagacatgttaccctagggtcaaagggcaggcatagggatgacagaccccgcaaggagccaccaaggcgggaggacaacgaggtgaggtggctccggtgcaggaggagagacaggccccgcccacccagttcctagggagagggagtgtccttctctaaccaaaggtgaggggcgcttctgcctctgaccaggagggactcactgccatgagtctttccctgcggctgtgaacaactagaacaccagacacattagaggaaacacctgcttccagacgccagcatagaccccagatacgggagagggaaacaaagtcccagggtctggcccaactcaaccttgagtccagccaagatgtgtgcaaaaggcacagcttcctctcctgtggagccaccctgagggacgcagagcctgctccctactctgcactccatgaacacaaacctgaagcaagatctgggcccttcccaggacgctctgactgcccgctggctcctccgtgctccctggcaaggccagctggcctgggctcccaggaggagagcttcacacgctgcgctcaggggtggagaggatgcgaacagaacctgcacctcaactggcagtttagaaacggagacagtgcgatgcctaaccctgtttttactctaactcgctactttaaattttgccctgtttgtctctttaatcacctagccttgtttctcatgtaaataagactctctctagctgggaaagccggacaaactccaactgaccccttaatttacaagacactaagggctccttacccaacccccttccgcaaggagttgacctgtgtaagcagatcctcagcatttcaaaggagcccaattaactgataaggtactggcaccaacaacgtctgaagttcccaggattcttctcaaagagataacaacataaagccttgagttcgtgtccggcatagcatctatgtctaactataatgaaggatttagagccctgcacctggtaccgttgctttttgtaaccatttgtcttttaaattgtttatcgctctgtaaccatttgcttcttttgattcttgcatgtttttacttctgtagaattattgcctttgagttcccctccccttcctaaaccaaggtatacaagttaatcaagccccttcctcagggccgagagaattttgagcgttagccgtctctttggctgccggcttaaataaaggactcaattcgtttcagagtgtggcgtcttctctaactcgcctgggtacaacaacaggaaactgcccaccgcagtgccgtgatcacaatggcgaacaacatgaaggaccattggtaagaaaatcgctaggtgcgttatggtgtggccgcttgataaaacatgcagccatttagattctgttcgtgaagaattgtaatggcgtgggaaaatatttatggtagaaccaaaaggaagaaagaattctcctggagaaacagtcgcatgaggggtagaccctggaaggccgtgctccacctggccagttacagagcgggataccgagtgcccagaggcttaccaggctatgtcccaggacgcgctgagggtgctggctgcctggcctcactggctgagcaggcccaccacagcggcaagcaaggctcagagggctcggcagtgtgaaaggaaaatatcactaagctaaagggagaagtcaagctgggaactgctcagggcaaacctgcctcccattctattcaaagtcaccctttgctcactgagatgaatgcgtatctcactgcctcctttggagaggctcatcagaaattcaaaagaatgcaaccatctgtctcttacctacctatgacccggaagcctcctccccacttggagttgtcccgcctctgcagatggaaccactgttcatcttacatatgttgattgatgtctcctgtctccctacaatgtgtaaaaccgaggtgtgctctgaccacctcggaacacgtcgtcaggacctcctgaggctgtgtcaccggtgcgcatcctcaaccttggcaaaataaaccttctaaattaactgagacctgtctgagattttctgggttcacattttggtaaccacagggagattctgagtggagatgcctctgacctttgacaaaactcctatcggtacttggtactggaatgagctaactttatggctcaaaccaacaggacaatttgccgaggtctgggagcatcccctccagagaatccctgatctccccaaatttggtcaagatctaaagtttattttgctgtacaatgttggcagaagagctgaggcggggcttgcttgtctgacataatgtaaaagagtcttggaacatgtcctgggtccagagtctaaaacccctcatgacctttggaacaccaagctctgtgccaatgggtggaaggctgccctgccgcactacagtctaagcccagggcataaaacccctcgtggcttggagagaacccagggcccagggcataaaacccctggtggcttggagagaacccagggctcagggcataaaacccctcgtggcttggaaagaacccagggctcagggcataaaaccccttctagcctctggaattgtgtccagacttgctggccccttgctccttgctctcccaagatcataaattgattttatcttgaattagaagaacctgttctcccttacctcaagtagcggagcatatgcgaaaccgtcacagctacgcttgatgcaccgctacctttctacccctacgtcctcacgccctcacctgtctacccccacagccacacgtcctcactacctgcttctttacttgattaccaataaacagtgtgggctcccagagctgggggcctttgcagcctccatacaccagcgtgggccccctggacccaccctatgtactcttgtctcattcctttgactctgctggacttcgtagcccccatgacctggtgttgggtctgatcaccccaacggtacaactccctttttttggagttttacttgcttccaacaaggaaggcaagtttctcctgcttcatgatgatggaaggcaggtaactcctttatggagtttgcactcacttccaacagggaagatgagggttttttttttttttcctgcttctaggatggtagagagcagtctttagcctgagacctatccctaggtaagtaactgaattggcatttgccttggctaaagttaagattagcaaccaggccgggcatggtggctcacgcctgtaatcccagcactttgggaggccgaggtgggcagatcacctgaggtcgggagttcaagaccagcctgaccaacatggagaaaccccatctctactaaaaatacaaaattagccgggcgtggtggctcatgcctgtaatctgagcgctttgggaggcttaggcaggcgaatcacctgggtcaggagttcgagatcagcctaacatgcagaaaccctgtctctactaaaaatacaaaaaattagccaggcatggtggcacatgcctgtaatcccagctactcaggaggctgaggcaggagaatcacttgaacctgggaggcggagggtgcggtgagcagagatcacaccactgcactccagcctgggtgacacgagcaaaactctgtctaaaaaaaacaactccaaaaattagccaggcgtggtgatgcgcacctgtggtcccagctactggagcagctgagacgggaggattgcttcagcctaggggtaggaggagattgcagtgagctgagattgcaccattgcacttcagcctgggcaacaaagcgagaccgagaccgtgtctcaaaataaataagtaaaaactacatgaatgaaggacgagctaggaacattcttcataccacttaggatctgagtcctaagtacactcggctgccttaagccaagcctcaaggcagagaagcaaattgaatgggagagaatgcgcaccagtggctggccgcttagtgcggggaggtgggaccagcaggggcagggactcttgggtggtcttgttggggtgggggtgcttgggcacacttacatgtcggctgcactgacctgtgcactccaggcctgcgcgttctactgtgtgtacaatagcccacagaaaaaagccaactgcaggcctagggcagtcctcccgtgctgggccctctgtgctctcccccagcctcctacagccctgcaccccgcttccctctgcctgtggacccagctctgctctgatgagctgtgacagctcagacaagctcctcagtgtccccatgtctcagcggacatggtgccaacctccaagatgaaatgagtggagggatttcaaggcctaagggcaaaccctggcattggatgagtacttaactatcggccactaacgtcactgctcaacaaaatcaggagcggtgatgacagattcctagcataaaatgacctgctgtgacagtcctgaggcaatatcataagaacaaactcacatgaacgtctgatatctagttatatgtggatttgggacttttaaaactttcgaatatgaaagatacaaagaagcctgagttcaccttaactctctaaagcttctgactcacccttgtttgtgcaacaggtcatttaaaaagaacacaactgaaagacttagctccagtcttggtaggatttggggatctggtcctattttcccaccgctgctgttgagcaaagtttcaaagagccgactgggtactctcacctgtgcccctggtctggggagcccatgcatcctcagggcctgcacggcctggtctcgttccagggtcacggccttcagcaccacctcctgctcctgtagcgcctgctctgtctcctgcagcttggcagcaacctgggaaaaacgctgggactcagtccctgtgtggatgaccgggcagctcccatgcctgctgaggctccaatggcacacataggtgggagatgctcagagcaccaggctccccactgtggccaggccgccaaacccttcctgcccatgcataccccaggctgcccttgcaggccagcggggatcatgcagcgctactcaaaccacgcggctggtcaactacagaaacagcttatgcaagaaagtcaaggcgggtggacaggcggggtgcatttttattactctaatttattactctaattactcagtgaggtttagtgttttcaaatttaaagaaccatttggtaagaaccagacccgtcctgcccagccccacctctgcagagacgccgagaaggccccaggccctggtggccgcacacacctgactttttgccatgctcagaccctgaatcagggcctctgacttttggatctggtccctttcaatgtcatcacagcggcgctgccagtccaggcccagctgcacctgatcacgctccaggctccgctccctttccactgccagggacagctgttgcttgtacctaaggacacgtccaaccgctcagcattaatgcttcctgaggtcccttccacaggaaaagcagaggcacgatgggaaaggcagggctgccgctgtccctcctgctctcgcatggcctgcgctgggctgacatgctcccgagctcctgtggatgggcacactgggacgcccaatacaaagacgagcaggcgccaaggatgcccagatgccggagaaaacccaacaccatggatgagggtgatgcccacaaaaccagaagagccagcatgcagggagagggaggaaagcaacaaccttaaaagatcataaacgcggttatgcacaaaggaacggagctatgaaagcaaacaagcagaccagggtggacccagccacggggtgggcagggctgggagagcccccagagcaagtgcagagcagggtggacccagccacggggcgggcggggatgggagagccccccgagcgagtgcaaagggacagaggggtgggaacgcaggaacccgggggcttcctccagaaaaccagcgcacagatgagaatggaaggaggaaaccaccaaggatgtaaaggggcaggtccaccaggacagagcaaacgccagccttcagagagctctagagatcccacacgcacacagtaaggggaaacgttatagtatgaaggacgaaagaagagtctacaaggaaaaaagaacaagaattggactaggactaggctttacaccagcaactctgggacagaaggccatggggccacacactgggggcagaattccaggctgtgggtgatcctgtgacgggggagaggtccctcctgtcccaggcagcgacacagagatggtggcatggctctgcgtgagactggagggagactctcctgctggcctcattgcaccggtaaacttcagggagttcgaatgatagcaattgagccaccgtgttgtgagagggtccctggaggggctgcgtggccaggactgaggacgccgctagggtgcagagtgaccctggctgtcagacagtgagggaatggaggccttggccccacagctggagggactgaattctgccaacagctgggtgagtctggaagggaccctgggcctccaaggagaggcaggcctggccatcattgattccagcctggagagaccctgagccgggaatggctgagccctgcccaggccctggccccagaacctgagataataaatgggtgtttaaagcagctaagctgctaagtttgtggtaatttatacacaatgtgttcttgttttgtttaattatttttaggttttttttggatacagagtcttgctctgtcacccaggctggagtgcagtggcgtgatgttggcttagtacagcctccacctcctgggctcaagtggtcctcctgcctcagcctcttgagtagctgggactacaggtgcataccaccacgcctagctaattttttgtatttttagtagagacggggtttcaccgtgttagccaggatcgtctcgatctcctgacctcgtgatccgcccgcctcggcctcccaaagtgctgggattacaggcgtgagccactgggcccagccccacagatacatttttaaatccctgtaactgcaaaaataaataaatctttaacacaacacagcagctgtcaccatgcctatcttcccactttaaacaactgggacactgggcagtaaatggggcacggctttcacagagcgaacgatgaacacacgagcggtgcggggctgaggcccctcagagaaggtcctcgcgagatgggcccactcgccgcccggcttctctccacaggccattccggatccccgcagggacggcaaaccacgcagagcacggtggtcttgctgtgacgaggagatgaaggttggagtttggagaagctgaagtggctgaaatgggctttatgaggcagaggggcagagaggaggggaacctgggatctgtgcagggatcccctagaagctgtggctgacagccacatgcaaatacacaggagaagccaacaccggctgggccaagagcaactcgtgggaacgaagcagccagcacggggctccacgtgcgctgattcccagagctcgtcagggcggccggcggagcatccttggagctctcgctccagggcacgcagtggggtctgggagtcatagtgctgagtcagccctggtgaaaaggcttctctagacctgccccacctgccctcgcactgattttaaacaagtctcaaatgggtcaagctgccatgtaaatacttaactgcagccaaacaaaaaacagcacagccaaaaccagatgctcgccaacatcatattcaccatgtctgacatccagtgaaaacttaccagatgggcaaggaagtagaaaaaaatgtagctctctccagtagaaaaatcagcccatagaaacagactcagaaataaagatatgatggaattagcagataaatacatttaagcagctattacaaataagttcagagatttaaaggcaaccgtgcacataatgaggagagaaattaaatgtataaaaaagtctaaatattgtaatatgtgctgttttctttcagtgaatggaagagtttaacgaagaaggaacattggaatcaagagttgagaacataagccaggcggggtggctcacgcctgtcatcccagcactttgggaggccaaggcaggtggatcacctgaagtcaggagttcaagaccagcctggccaacatggtgaaaccctgtctctactaaaaatacaaaaattagccaggcgtggtggcgcatgcctgtaatcccagctactctagaggctgacacaggagaactgcttgtacccaggaggtggaggttgtagtgagctgagattgcgccactgcactccagcctgggtgacagagtgagactccatctcaaaaaaaaaagaaaaaaagttgagaacattatcacagcatgttttttttcttctgcattagttcatattatgagggttttctacatacacaagtaataggtaaatctaaatgtgctttcttgaagatacatgatgttttatttcagtcaatggaagtatttaacaaaaaaaaaaaagaatgctggaaggaagagctaagaacgttattacaacatgtttctttcagcattggtacttttcctttttttttttttgagacccagtctcgctctgttgcccaggctgaagtgcagtagcaccatctcggctcactgcagcctccgcctcctgggttcaagtgattctcctgcctcagccccccgagtagctgggattacaggcgtgtgacaccacaccgggataatttttgtatttttagtagagatggggttttaccatgttgtccaggctggtctcaaactcctgacctcaggtgatctgccagccttggcctcccaaagtgctgggattatagatgtgagccaccgcgcccggcccaccaaacatttatttatattttattttttatttgtttattcatttttttgagacagaatctcactctgctgcccaggctggaatgcagtggcacgatctgggctcaccaaaacctccgcctcctgggttcaagtgattctcccacctcagcctctggagtatctgggactacaggcgtgagccaccatgcctggctaatttttgtatttttagtagagacggggttttaccatgttggccaggctggtctcgaactcctgacctcaagtgatctgacagccttggcctcccaaagtgctgggatgacaggcgtgagccatcacacccggcccaccaaacacttttaaaccatcagaactcacttactatcataagcacagcatcggggaaaccgcccccatgagccaatcacctcccatcagggtcctcccttgacacatggggattacaatttgagattagatttggggggggacatagagccaaatgatatcatacagcatacacattcatcaaaattcatcaagtgtagagttaaaatggatgagtttagcatatgtattctgtaataaagttgacttgaatgtgtatgggaaatagaatgctatctttgttcaaggaagtgttcgccccaacggataagaaacacatgaggacatgaacaatcagacaagacagacgaggagattctttgtttttgttttcctttttgcagagatggggtctcactatgttaaccaggctggtctccaactcctgggttccagcaatcctcctgcttctgcctccctaagtgctgggattataggtgtgagccaccacgcttggcaagaggagattcttagtgcagaatcaagcaggagcacctttatggctcttattacagactgagaaacaccatcctctggccatgctccctccagcaggcggccccttctgcatgtcttcccacaccacccctgcgtgaccagacattctatctgtcttgttcactgtctttctcccccaagaaaatgtgaggccagggactcaatctgttcagttttgaatccttagtacctacaacagcacctgcccataggagaccctcaatggaaacatctgcctggggacagttacctttcaatgtcctgctgggatcgggccacctgtgccttgagcttcacctcttcttcctgcagcgtctgaatctgaaggtctctggagaccatctccttagatagttgagcaatttgagcatcccaggcagattttacagttgatgcatcttcacgaagtctaaacatagaagggaaactatgtagatgtggttctcactcactaaagttgtctcttacacagcaccccccagcaaatacacatgcgcgcgcgcgcgcgcacacacacacacacacacacacacacacacacacacacacacacacacacagctctcgagctgaaacttcctggcctagatgatgaagatggttccgcacaggaagaattaagcatccgtccacccaactacctccatgcatgcatgcatcccaccaacccagattccagctaagctcctgcagcacaccaggccatgtgccaggttcttggtgggcggaaggtgaggcatgacatgcctcccatgcccacagagcccacagtcatgaggtagcaacacctctgaccaagtcaccctcatgtcctcgccatgcctagcacagcaccccacgtgcagagacattcagcacattttcaagttgcatggtaaaataaggttctacagaacccactaaataaccttaacagcaggatgcctctgggagaattacccaaaatggaataaatttcccaagaaaatgttcgggacaatatctagagctgttaactcaggtagccacagtactaacctaggcaagatgatacctgcccacttgcatgggcgtagccctgtttccctaagagatgggaagacggcccacaagagcaactgtagcatcacacacgacagaccttcagatgctcctgtgctgatgaacttccaactgacagtgagaagcagagggtgagctggctgcccccacagaggccaccccttgtcacgaggggttaaacctagcatgagtggtgcactcaagcctggtattatatagaatggaaaaaaagccaccctgccaacagttttggacacatattttaggacagctgaaaagagacaccatcaaaggcatcaacgtttccagccatctctggcaatgtgggctgacacagaatgtgtgtttggactccttccacgctttgcgtgggtactgaagaaacagactcaccaacggcctctggtgctctgggaagcagctttatccctggaccatgagccacctaattatgagggccagccccactcccagcatcaggatggtgatgtgactctgcctggggcctcctggacagtctcccctgatgcacagtctcaggtgtagatcaatgggcacggctgctgagccctcactgcagggacagaggacaccacggccacgagcgggagtgcactgctcaccacaagagcgtaaatgctttttgtgagaagccaaggtggaaggatcacctgagcccaggaggtcgaggctccagtgagccatgatcgcactgctgctttccagtcttctctttcttctgcgtaatgggatggttaaaataaaaaagaaggctgggcatggtggctcatgcctgtaatgccagcactttgggaggccgaggcaggcagactgcttgaggtcccagagctcgaaaccagcctgggcaacatgactaaaccctgtctctactcaaaatacaaaaattagccgggtgtggtggcacgcacctgtagtcccagctacctgggaggctgaggggggtggatcacctgagcccaggaggtgtaggctgcagtgaaccgagatcacgccactgcactccagcctgggtgacagagtgagaccttgtcacaaaaaaaaaaaggaagaaaaaaatgctttcctgttaatcctacaggttttctctgtagttccaaactccaaaccagcacaaaactgctgaaaaacctattaagaactacaaagctggccaggcacggtggctcatgcctataatcccagcactttgggaggctgagatgggaggatcacttaagtccaggagtttgagaccatcctgggcaacatggggagaccccatctctacttcattttaagaaagaaaaaaaggaactgaaataaatatggctgtcacttatttctatttttttagttaaaaaattatttttttagagacagagtcttgctctgcctcctgagtagctaggactataggtgagcaccaccgtacctgtctaacttttctttgggtagacatagggtcttgtttcgttgcccaggctcaagtgatcctcctgcctcagcctcccaaagtgctgggattagaggtgtgagccactgtgcctagccgaggtcatcatttaatgccagctcatacttgggatcatgggatccgaatgatagctgaactccccagaagtaaaagaggaaagatacaagctttagaatgtagaagtctgtttcttactaccaaaataatactgcatatgtgtagtaataattctcaatgagcaaagagtatttacggacagaaaacgaaaagacattcaagaacaacatttagcttaagactgcaacggggggccaaggttaggcgcacaggagtggtgacgcccagtcacctcggccgcactacatggaaaatggaagcacctgcggcccctctcaccccgtataccgaccacagaggtcgccccgcacaccgaccgcagaggctttaggtgcctcccatgcatggcgtcttcaaccactctgcttgaatctgactgatcaaacaacaacacagcatgctgaatctagagaaactatcctgaataagcccttaacttcctggtactgtgtagttctaagagccatttcccccttaaacagaaatacaatttgtcagagaattctctatcggtggtggctcatgcctataatcccagcactttgggaggtcagtgtgggaggatcacttgggtccaggagttggaaaccagtttaggcaacatggagaaacctcgtttctacaaaaaatacaaaaattagctgagcatggtggtgcacacctgtggttccagctactgcggaggctgaggcgggaggatcacttgagcccatgaggtcaaggctacagcaagccgtgatcgcaccactgcactccagcctagacaacagagtaagaccctgtctcaaaaaaagaaaaagaggccgggggcggtggctcacacctgtaatcccagcactttgggaggccgaggcagggggatcacaaagtcaggagatggagaccatcttggccaatgtggtgaaaccccgtctctactaaaatacaaaaaattagccgggcatagtggtatatgcccgtaatgccagctacttgggaggctgaggcaggagaatcgcttgaacccgggaagtggaggttgcggtgagctaagattgcaccactgcactccagcctcggtaacagagccagactccatctcaaaaaaaaaaaaaaaaaaagtcaagatgaaagaaaagaaaaagaagaaataaaggaggaaaatggttacaatagtaaattttatgttatgtgtattttaccacaatttaaaaattcagagaaaaggaaaaaattctgacacatgttaaaatgtggacaaactttgaggacattatgccaagtgaaataagagagtcccaaatggacaaatactgcatgattccaacttacaggaggtccccagcccggtcgcatccatagaatcagcaagtagaatggaggtggccggggctggtggggctcggggggagctggcaggggtcgggggggcactggcgggggtcggggggcactggtggggctcgggggggagctggcaggggtcgagagtgctgacaggggtcgggggtcactggcagggctcggcgcgggggaagctggcaggggttgcggggggtgctggcgggggtcggggggagccggcggggctcggcgttgggggaactggcgggggttgcggggggagctggcaggagtggggcagggagttggcggggctggggggagctggcaggggttggctggggagctggcgggggtgggggaggcgttggtgtgtaatgggaagatggaaagttctggagatgacagtggtgatggttttacaacaacgtgaatgtgcctaatgccactgccactgatctgtacactaagaaatggctaaaatggctaattttatgttatgcatatcttactataaatagatgaatgcacacacacatagaaactacacaatttcaaaaataaagaaaaggcaaaaaaaaaaaaaaaagagtggttaagaaaagtgactgagagctacagaagccactctgtctgctgcctggccccctttcctgtggtctggcaccagtgggcccaggtcagcacagccacggccgtccctgccctcaccctctgggtggagccaagcacacgctcactggtcaatggcagcgtccttctccttggcggtgtcagcctgtctccactctgccctgcggagctgcgcctcgagggtctcgcagtgggcctgcagctccagaaccctggtctgcagctcctgcagctgctccacgtgggctcccttcaccgccaccagcactgcatccttctccctggccagacggtcgagctcctcatgcctgaaacacagtgagtgtcccatggcgctcacccagcccccaacacccaggccccagaccctctttggaggcgttcattgccctgtctcgtgcacaggtgctgctgtatgtctgcctcaaggcttcgcagcagccacctggccacctgttcctcattcctcgcaggtaaacatggaccaagccacttttcgatgccaggcccctggcctgccctccagagcccacagccccctggagaaggacaccaaaaggaggtgcatagagcacagtttgatccgatcaacctgcgaaaggaggtgcatagagcacggtttgatccgatcaacctgcgaaagcaaaaaaaggtagatgcacactgccttgtatcctggcagccagccaggtctacggagccacaccgcaccccacctattgattttccaattagaggcaaagtcttgctgtgttgcccagcctggccttgaactcaagcaatcctctcacctcagcttcccaagtaattgggcttataggccacaccactttgcctggcaaaaagattttactttaaaaatattatgttagcagccaggcacagtggatcatgcctgtaaccgaagcactttaggaggccgaggcaggtggatagcttgagcccaggagttgaagaccaccagcctgggcaatatggcaaaacaccctctacaaaaaaatacaaaaattagcctttacggtggcgggtgcccatagtcccatttactcgggaggctgaggtgggaggaccaccggagcgtgggaggtcgaggctgcagtgagccgtgatggtgccactgcactccagcctgagtgacacagtgagaccctgtctcaaaaacaaaccacattagcaacagtattaaataaataaaaaatttaaaaagatttacgtgttgatttcctaccctctgagcatattaggttctactaagcagagtgctatcaggtatatgtaatgttatgtaagccatctcggtgaagtctttgatctaaccctactgggactgagagagtgaacagctctgctgactgggtttcagaccccttggcaaggccaaccccagctgtctgcttccaccaagttggagaagctcattcaattatgagctgatggatgatttaaaattattcctggctgggcgcagtggctcatccctgtaatcccagcactttaggaggccaaggagggtggatcgcttgaggtcaggagttcgagaccagcctggccaacatggcgaaacccagtctccactaaaaaaaatacaaaaattagccgggcatggtagcacatccctgtgatcccagctactcgggaggctgaggcaggagaattgctcgaacccgggaggcagaggttgcagtgacccgagatcgcaccaccagcctgatcaacatggagaaactgtctctactaaaaatacaaaaattagccgggcatggtggcatgcgcctgtaatcccagctactggggaggccgaggcaggagaatcacttgaacccaggaggcggaggttgcagtgagccgagattgcgccactgcactccagcctgggtgataagagtgaaactctgtctcaaattaaaaaaaaaaaaatgatgagacactagtcatctccgtgtgagcagtttgtctctccagtaaattgcatatcccagtatagagtgacctctcaaggttcttcatatcccagcatagagtgacttctcaaggttcttcatatcccagcatagagtgacttctcaaggttcttcatatcccagcatagagtgacttctcaaggttcttcatatcccagcatagagtgacttctcaaggttcttccctatttctcattgtgtttagtgtaatactgtaaaccttcaataacaccatgggacctatgcaaaggtccaccagtgatgctggaagtgagcagaggaaagtcatgcatttgcaagacaggtctgcagctgctggccattctaaaacacattaatccagtctgggtgtggtgctcacccctgtaatcgcagcactttgggaggccgaggtgcgcggaccacttgaggacaagagtttgagaccagcctggccagcatggcaaactccatctctgctaaaaatacaaaaattagccaggtgtagtggtgcatgcctgtactcccagctacttgggaggctgaggcatgagaatagcttgaactcaagaggcagaggttgcagcgagctgagattgcaccactgcaccatctgcctgggcaacagagcgagactctgtctcaaaaaaaaaaaaaaaaaaaaaaaatcttttgataatggacaatgcctcttgccacccagaacccatgagttcaacagcaaggtgttgacgtcgtctgcttgctcccagacataatgcctctaattcaacctttatgagaggccatatggaccttaaggctcactacacatggcgctctttggaaaggatgtcaatgctgtggccgaaaaccccccagaaagaagaacatcctgaaagcctggcaggcttccaccactgaagccattgttgctatagaaaaagccacggaagccatccagcccaaataataaattcctgatgaagaaagctgtgtctagatgtcgtgcctgacttcacaggatgtccaatggtgccaatcaagtaaatcatgagttgtaatacggcaaaaaaataaaaataaaaaataaaaaataaaaaaaaaggtcagggtgcggggtgaaggatttcacagcatggatcttggagaaaccccagagctgaccccacagcagaggaatgaacgggagacaactcaatggggatgagtgcttccgaaccggcgccagatgatgaggaaacagatgtagaagaagcagtgccagaaaagaaactggcatcagacagacactcctgcagaagggctcccatcactcacgcctgccttgactttttaccacgtggaactgtctatgacgtgggcactgagactcaagtgttaaagcgggattggcaccatatagaaacatttttagaggaaggaaaaagtaaaaaagtcaaatggaattacaatgtatttctgtcaagttacaccaagggtacctgcctctcctgccctcccttccacctcctccacctctgccactccagagacagcccatcctctgcctcctcctcaacctcctcaatgtgaagatgatgaggatgaagagctataagatgatctgcttccacttaacaaacggtaaacatattttctaagatttttttttaagacagggtctcactttgtcacccagggtagagtgctgtggcaccacctcggctcactacaggctccacatcccagattcaagtgatcctcctgcctctacactccaagtagctgggactacaggcgtgagctgtcacacctggctaattttttgtattttttgtagagaaggggttttgctatgttgcctaggctggtcttgaactccagagctgaagcaatccacctgcctcggcctcccaaagtactaggattataggtgtaggccaccatgcccaacctaattctacttttttatgacttttttttttttttttgaaacagagtctcactctgtcacccaggctggagtgcagtggcgcggtctcggctcagtgaaacctccacctcccaagttcaagtgattcccctgcctcagcctgccaagtagctgggattacaggcgtgcaccaccacgcccggctaattttgtatttttcgtagagacggggtttcaccatgttggtcaggctggtctcaaactcctgacctcaagtgatccccctgactcagcctcccaaagtgctgtgtgattattttaatgacattttctttcctctagctagcattactttaagaatcagcataggatacacacaacatgcccaatgtgtgttaatgaactgtgttatcagtaaggcttctggtcaacagtaggttctaagtagttaagtttttggggagtgaaaagttatatgtgaatttttgacctcatggggctagatgcccctaaccccctcactgtttaagcatcaactgtatttcaatttatgattttgaaaaatgccaggtgtagacttaaaaacacacgaagagaaacagtgtttgtccagcttcatcatggccacacggtgcagctaagcaagcagtcctgcaccactgccatctgcactgtgtctgtttgggctcgactgcctcggtttcctcatctaggtagagaacccggatgggtgccctcacaatgcgagccagctgagggcacaaccctctctcgctgccaccagtagggtctgcagagcaggctggaaagcagcttcccactgcagatctgattagaaacagcacagacagtgtccttgaagttcttctggatttatacaactgcacaaatatcatgtcaataaaaaatgcaagaaaaatcgcctgagtcactgtccatcgccgttgtattacacagtgtctttttgtatttttagtagagatggggtttcactgttggtcagggtggtctcgaattcctgacctcaagtgatccacccacctcggcctcccaacattctgggattacaggcctgagccaccgcgcccagccaggtgttaaaaattttgtgttttgttttgttttgtttttgagacagggtctcattctatggcccaggctggagtacagtggcacaatcatggctcactgcagcctcaatctcccaggctcacatgatcttcctactgcacctagtccaagttctacgttttacagcactaagaagtctaaacatcaccgagaaagtccagagcataaacagaaatccaaagcaaggctgggtgtggcggctcatgcctataatcgcagcactttgggaggccaaggaggtgggcgggtcatttgaggctaagagttcaagaccagcctggccaacatggtgagaccctgtctctactaaaaatacaaaaattagccaggcatggttgtgcacgcctatagcaccagctatttgggaggctgagacacgagaattgtttgaacccgggaggggaggatgcagtgagccaagatcacaccacggcaatccagcctgggcacagagcaagaccctgtcaaaaaaaaaaaagcaagcaagaaagcaagaaagcaagcaagcaagaaagaaaggaagaaaaagaaggagaaagaaatccaaaacagcgggctcccaggtccgatccctggagtgggaccctctgctccctgggccatcagcacaatggttccacttccctcctctcctggggccactgacatgctgcatgatgttgggagccgaaacactcacttcctcttaaatgtttcctcttccttcttcctggttagctgcacagagtgaagtttatcctctaaatcctttaccctgaaaagaaacaaatatttatggaaggagcaagtgagatgaaagcaaagaccagcctggaatgagcagaaaaggtagaatcccccagactccagtcctggcctgcgaggctgccacagagcacgcctcgggagatgaaggactcgcgcaccgggcgcggctcatggcctccaggtcctggagctccccggctcggctctggagcttcctctccagctcggcgttggtggcctctgccctctgcagactctctgcagcctttgccccggcttccttcagagcctccagctctttgtgcagtagtttaacctttgaatgataaaaatgagttcaaaatgaggtgataattagaagacactgaggcattaggggtacatactgctgttttatcaggattgggagggagaagaaaaatgaaaattcaagaagcagtaaaacagtgagaatgtcctaacacaactcaaacgagactcaatgacttttttttttttctttttggagacagagtcttgctctgttgcccaggctggagtgcaatggcgtgatctcggctcactgcaacctccccctcctgggttcaagcaattctcctgccttagcctcacgagtagctgggattacaggcacccaccaccacacccagctaatttttgtatttttagtagagacagggtttcccatgttggccaggctggtctcaaactcctgacctcaggtgatccacccgcctcagcctcccaatgtgctgggattacaggtgtgagccaccgtgcccggccttcattgaccccctgacagcactcagtaccccaccaaaatcagtctattagggtgccccatacatgtccaagcccaacagaccaatttaactgcacttcatttcttagcacataatttgaaagttatttaaataaggaaattaaacacaaagccaggggtctaggaaggggctcagtgctgagcaagccactcgcgtcccagctgcacactgagctcttcggtaccttcctgggcctgtttcccagcctgtaagccacgggtggtgacgatggctgctgcacccaagcctgctgacatgaggaccgggctgcgcccggcatgggcaggcgtcgagactcagctcttgcttttcctactgatctgtgcaccgtgatgcccaccacgggcaggtgtccagggctgtgaccaaatcacacagcagatgcaggcggaggtgaactggcacccggtgcccacctttgacgggagtgcccaccctgccatggggcacagggcatccacatggcccacctgctcgctgggcttgaactcctgggcccaagggatcctcttgccttggtctcccaaagtgctgagatgacaggtgtgagccaccacacctgaccaaggaaaaaccgaaaaaccttcacgacccaagggtgcccccagttaccttaagctcccgggacaaggctgtgttgctcatgttgtcagcctgcagacggaattcgtgctccctcttccgcattttcgattcaaactccagcagcagttcctggaacaaacaggtttcatgatgaaagaacagtgggaacccagcaaagacccccacccacgtcctgggaggtgggatccagaggtgagcaggacacagtgtttaacagagaaggaccacacacactgtccaggagagaagctggggtcagcgacactggtaacagcactctgggaggccgaggcgggaggatcgcttgagcccaggaattcaagaccagcctgggcaacacagtgaggccctgtcgctacagaaaaaaaaaagaaaagaaaaagaaaaatccttatctccattgagtcaattctacctctgacaataacaaacaccaagatcttccaaaacaagacaagaaatcagagcaaaggaaaccatgaaactgacaagcacgtaagaccctagcttagtaactaaaaggctgagatgccggcagtagaacagagcttcccgacagccagtgccagcatcccagagcccacacaggatcggactacccagaaccacaccggatgtgtgctgcccaagtttcccctagtaaccaaagctgccacgttaaaacgtcacgtttccttctttccagagacaaggatactatctgaacatgataaaaaatccatgttcccaacgtctgagatggctctccctgaacgagccctgctgagtctgagaaattcggcgtggacagcctgggaagtcagccatagtcacggcccagccagaaactctgacaagaatggctgcgccctgccaactacaaccagcctcaaatcgccactgtccccagatgctgccaagagccccccacctgctgggcaggaccacccacagctggatcctcctcaaactccttctttggaagtgactttggagccacttgaggaagcctcactacttagaaaagtcaccactggtctcttactgaccacggattttagacgctggcttcatgcctaaagaactccggctgttctcaaactcatccataatcgacaaagctctttggtttctgagaattccaagagaaagtcctctgcaggccatttcagaagcagcctcagggacctgtgaacaacgggagtgagctcagcacttccggggacaactggacagtccacaggagggcccatcatgacgtgagcgtggcctccttctctgctgacctgactgtggcaaattagtgacacactggcctatcctactatgaccaagctcccaacatccgacaggaccagagaggggaccctgtcacacctgcacaaagcccttcatcactgctgcacctgcacagacgcagccccttatgacacccccatagacacagcttctagtaacacttacacctacctgcatagacagagccatttattacacctgcacctgcagagacgcagcccctcatcacacctgcaccttcacagaagaagcccctcaggacacctgcagagacgcagcccctcatgactcctgcacctgcagagacgcagcccctcgtgactcctgcagagacgcagcccctcatgactcctgcacctgcagagacgcagcccctcgtgactcctgcacctgcagagacgcagcccctcgtgactcctgcacctgcagagacgcagcccctcgtgactcctgcagagactcagcccctcgtgactcctgcagacgcagcccctcatgactcctgcagagatgcagcccctcgtgactcctgcagagacgcagcccctcgtgactcctgcacctgcagacacacagcccctcatgactcctgcacctgcagagacacagcccctcgtgactcctgcagacgcagcccctcgtgactcctgcagagacgcagcccctcatgacacctgcagagacgcagcccctcgtgacacctgcacctgcagagacgcagcccctcatgacacctgcacctgcacaggcacagcccctcatcacacgtaaacctgcagagatgcagccccttgtcacatatgcacacagtggcagcatctctgactgtggtctctagatataaatctataggatgtctttcaacaaaaccccagcacagctgagtctcttggaggtgtaggctgagtttccagaacattgaggagaaattcggtgactgccacttttcagttgaagcatctgtttttaaacttatcataattgaattccaaattcttttccatagtaaataattcatgtttttaaaattatacctttctaaaaataaatttaaaagtttcatcatttctgaggtgtgctggttaattccatgtgtcaaatgactgggctacgggctgcccggatagctggtaaaaaattatttctgggagtgtctgcaagggtgtttccagaagagactagccctcctcctgtggatgggcgtcattcaatccactgagggcctgaatagaacgaaatgcaaggaagggtgaactcgctctctctgcttgagctgagacactcgccttctcctgcccttggacattgggctcctgcatcttgggccttcagagctggaccaggactcacatcagtggctccctggtgctcaggcctttgcccctgggctgaattacaccaccagcttcccaggttttccagcttgcagatgacaaactgtgggacttcatggcctccgtaactgcacgagtgaattcctacaatttatctcctatatatctacacgtctcctattgcctgtttccctggagaaccctgactaatccatgaggaaagaaaacaaggaaacactgtggaggtggctgcatgtagacatcccatcctgtttccctgcagaccatcccagagtggcatctgccccaaagaccccattttactcccaaggagaatgcaggcaatgaaccaaatggttgtcttttcctcagccctatatgatttcagtttcacagtgggcaggcagggaaagcacccaggaaggggccgacccagaggctctacctgtctctgcagagcaagctcaccgtcgagctcctcaagttttctctccagtgtccattttagattttcatactgttcccggtggtggtcaatctcaccattcttgtcactatggtaataaaacagcattaagaaaagccataccaaatattcagcaaaggtaatacattttcaaggtgcacttgacatgtgaaagttggtgctttgcttttatgaaggggtggcttcagcaggacccacggggtagcagaacttccagccccacctggaccagcatgctacacccatctataaaagaggaaattaaatagggcccagagtctcacaacataaaacccaaaatgtccaggatacaattaaaaaaaaaacctgacaaccaaaaaccggaaagatctgaccaggcccagtggctcacgcctgtaatcccagcactttgggaggccgaggtgggcggatcacaaggtcaggagatcgagagcatcctggctaacacggtgaaaccccgtctctacaaaaaaatacaaaaaaaattagccgggcgtggtggcgggcgcctgtagtcccagctactcgggaggctgaggcaggagaatggcgtgaacccgggaggtggagcttgcagtgagctgagatcgtgccactgcactccagcctgggcgacagagcgagactccatctcaaaaaaaaaaaaaaaaagaaaaaggaaaaaaaagaaagatctgagcttgaaggagaaaagataataggtagatgccaacaccaagatgacacagacgctggaattcttcaacaaggaagctacagcagtcattataaaagcgcttcaagtaatctagtaaagcaaatggaaaaacaaatctcagcaaagaaaaagctatagcaggctgggtgtggtggctcacgcctgtaattccagcgctttgggaggccaaggcaggtggatcacccggggtcaggagtccaagaccagcctggccaacatggtgaaaccccatctccactaaaaatacaaaaattagccgggcatggtggcacacacctgtagtgacagctcctcgggaggctgaggcaggagaaccccttgaaccccggaggcagaggttgcagtgatccgagatcgcgccactgcactccagcctgggcgacagagcaagactctgtctcaaaaaaaaaaaaagagtgtgagactgaaaaagtacctgaacatggctgaaaacatcccaggtttggagagaagaatgagcaaaagacttgaagagacacttcacaacataacgtaaagcacttttaaaaggatgctgtaaacactctggaaagcagctatgagaaagtcagcacccgcacggcgggcaagtgggcctcagctgtccaagcactgcacgcacctgcacggactcggcgcccagacgaggtgcaggctgagcaccagccttcatgctggggacgggagcttccagacaccctccctccactcagggagaagctgacctccagctcaactctctctttccctggacactgggcaggtggcacacgggtgtctaccacattagcaagcagcactgcgtgggtcaaatgactgctgactggcactttttatccacgccgcgagatgcgatagagagagggaccatcaacactgtgggcttcccagaagacggtggcgctcagggtacatctgctgcagggactgcagacgcgatccctgcgggctgctacaggagatactggctgcacaatactggttggggcttctgagctagaggggcaccacacccaccaatgtgggtctcctctccttgcacctgacctgccgcagaaggtctctctgctggaccggagcacctggtgtggtcctgttggcccgttcacacccatctgagacccttctgagcaaaccggcccaacacacacaacagagggtagctggtcagttaaaagggcgtggcagaacccagcgcactgacacgaaggacagacaccacaaatcgatcaggaagtgctggacgcacatttcggagcagtgtgcgcaggtggctctatatggggcctggagatgacacaacagattgcccgtggcggctttcacttcgccattccaccacagtatcttctctgagaaatgactttctatgataagaatagtttactcctgcggctttaaaaagtgctttaaaaagctgcttatggccaggcgcggtagctcacgtctataatcccagcacttcaggaagccaaggccagtggatcacctgaggtcaggagttcaagaccagcctgggcaacatggcaaaaccccgtctctactaaaaatacaaaagaaaaaaaaattagccgggcgtggtggtgggcacctatagtcccagctacgtgggaggctgaggcaggagaatcacttgaacccgggagatggaggttgcagcgagccgagatcacgctactgcgatccagcctggacaacacagctaaaaactctgtctcaaaaaaaaagaaaagaaaaaaaatgctgcttatgttagaagaatacataaaacataaaaaaagtacccaggatcctgttaagtgtaaacagagcatgcagccggctctcctaacgtctgtacacacgcatcacacaggaagggcctctgttaatgtgctatgatgaacctgcggtacttctgaagtgggggatggaagagcttatcagagaagcctgtcctccttccttcctgtctcctcaaactctccacagcatggctgggtgagtggagctgaggggataccaggcatgtggttgagttccaggggccccaccacaggccccacaacaaaggctttaggtttttatgtcgacttgccttaagtcagctcatttagttttgaaattactacagacttccattaaaatcattataaattcaaatatgtattaatatagatttataattaatgaaataaattccaaatattaaaaccaatctccattaatttcagagttatatcagaacccagaaaaagacagtcagggcattcctggatccatccacattaactcaacaaacacatgttcagaggccacgaggcactcggccactcagacagaccagctcccgtggcctggaatcagcagcgggaggaggggcagtgagagtgggcagtgctcgggcagcacagcggagcaggaggcatgtgggggcctctgccaggcactgcacaggagggcgcgtcggtcggtggctcacctgtggacgcgctccagctccaggcgatgctcctggaatgccagctgctgctgctgctgcagctcctccaccttcctggcctctctggctagcgcctgcctcagcttagctgcctctatcttgagctcgctcacctctgcccgcctggcctcttcccactccctggcctgggcgaaggcggcgtcatagcgctccagctcgaggtcccgctcctccagcacctgaaggttgtagacaaagtcctcctgcaggcaccgcagtttcccctgcgcctcctccagctggctccgtgtgtcctgcagagccgcctcctgcagctgggtgcggtgtgcctgcagcgccctccactcctcctccttgcgaagcagcagctcattcagggcgggctctgagcccagtggcagcatggtggccgctgcagtaaagagaaatcaggttcagggtgcaccgtgaggggccctaattttcctaccacagtacctacctcacattccctatcaacagttaccacggccgggcacggtggctcacacctgtaatcccagccctttgggaggccgaggcaggcggatcacctgaggtcaggagttcaagaccagcctggccaacatggcaaaaacctgtctctactaaaaatacaaaaattaggccgggtgcagtggctcacgcctgtaatcccagcactttgggaggcccaggtggatggatcacttgaggtcaggagatcgagaccagcctggctaacatggtgaaaccccgtctctactaaaaatacaaaaaattagcctgctgtggtggcacgtgcctgtagtcccagctactcgggaggctgaggcaggagaatcgcttgaacccaggaggtagaggttgcacaccagcctgggtgacagagcaagactctctctcaaaacaaaataaacaaaaaaaaaaggccaggcatggtggctcactcctgtaatcccagccctttgggaggccaaagtgggtgggtcacctgaggtcaggagtttgagaccggcctggccaacatggtgaaaccccgtctctactaaaaatataaaaattagccatgcatggtggcgcatgcctgtgatctcagctactcgggaggctgaggcaggaggatcacttgaacccaggaagtggaggttgcagtgagcagagatcgcaccattgcactccagcctgggcgacactaagactcttttctccaaaaaattaaaaaaataaattaaaaaaaagaaatccaggggaagtagaggaagggaagatgggaaacatggtttgtccagctataagagctaggttctataaaatagcttcaacgcagcactctgtccatttcacagctgagaaaactaaggctgctaagtggctacgtgaggactgacagcaggtcagtccctcagaaccaatgccccttcccacccaacaccctgctcctggaagattcaccacctgatatggtttcgatatttatccctgcccaaacctttgtggaattgtaatccccaacgggggagctggggcctggtgggaggtgtttggatcatgtgggcggacccctcgtggcttggtgccgtctttgtgacagtgagttctggggagatttggtcatttcaaagtgtgtggtgacaatgagttctagtgagatgtggcatctctccaccactcacactcccctcttgcttcgtgcctgctcctctttcaccttccgccatgagtaaaagtttcctgaggcctccccagaagcgggtgccaacactgtgcttcctgtacagccaggagaaccgtgagccaattaatctttctttataaattacccagcgtcaggtatttctttccagcaatgtgagaatggtctaatataccatccgagagtacattcttttgttcttttatttgttcatcatggactgatattttggtaaaaccataaaaataaagtgctacaaaaaataaaatttaaaaacaaaaatcacaaaaaccaataagctgggcacagtagctctcgcctgcaatcccaacattttctgaggctgaggtgggtgggtcattcaaactcaggagttccacgctgcagtgagtggtctattaaaagataaagtttcttctggctggtcctagctgcccccaaccctttagaggtccaagtatgagctcgatttggacacagaaatcccccacaactcttctctggtgtccacacaggggaactgcatggcctaaaagggccacacccagttgggggacaagcacaaacttccggcctggtgggacatggccggggtgctgctgccagagcaggaaaaagccccagcctgtcttagggtacctctgtatctccgggcacctctgcatctcggggcacagcaatggttgtacaaagtcccaactcccagagggagcgggtacaagggcacagccaggctgagcaccggctgtgacgaagcacaaggaggaggtgggtaaggggctgcaagacccgtgggcccctccagaaagggctggtcagcagggcacacccgctgggggcacgagggctccctgggggtcctgagacggcgcttctctgacgaggctctggagcaaagacggtctcctccatcccacatgcttcctgcgatgcaacccccgcgcccagcaccctaggaccatcacgccacctggaccacctcagcctggctcctccaagctgctgcgtgcccacccattgccggagctaacagggtccctaccgaccatctcagcactctcccacgctcctgttcctcgtctccctcagctcctacaacggccccaccgtccaccccgtgtaatgatccttgacctcttgctgtctcccaccttgtgcccacacctcggccaccacagtgtcttaccacaagagacctcaactggcctctgctgtgcactcccacttttttggctgccaaaggaatcttttcaaaaatgctttaccagggccgggcgcagtggctcatgcctgtaatcccaggactttgggaggccgaggcgggcggatcataaggtcaggagattgagaccatcctggctaacacggtgaaaccccgtctctactaaaaatacaaaaaattagctgggcgtggtggtgggcgcctgtagtcccagctacttgggaggctgaggcaggagaatggcgtgaaccccggaggcgaagcttgcagtgagctgagatcgcaccactgcagtccggcctgggcaacaaagagagactccatctcaagaaaaaaaaaaggcttaaccaggcttcccattccactgaggacatctggaccccaggctcctgcctgtcgctgccacgtgccctcagagcctgggatgtgtggcaggtgccgctctgtctgcaaggttcctcctaaccgcagggcaggctcctcctgccagtgggacctcaacctgaacatcactgcagggaagctttcctaacttccatctcacgttggcacaacgccatcaccccagtgtcgggtgtagtgagtcccactgtctggcacagtcttggcgactgaaacattttgtacacagaggacatgcacacacctgtgcacacacctgtgcacacacagggaaagaattggactatcagcaaatacacattaaatgatggaacaccactgtgatctctgatgactcagaacccttcacacagtgcccgtgagtcatgacaacggttctctgcagagcctgaggtctgcgaggtctacgggcctcttctctgagggactgctgtggcccccgtcctgtaccagctgccctgccactgggcttgcctccttaactcattggtcgcagccacccatgggggttgccgttctgagaatctgatcatgcaatcttatctggcctcaaatgtgcccgcgactcctgaccattttcaaaataaagtccgatctccttggcacagcgtatgaagacagaccgaggacacggcccagcctgcgtggctccagctgctccctgcaggcccagagcagcctttatctgccagttcctgtgcacgtgctactccaggtccccatgcccccatctccccactgggtgaggttccttcccaccaggtctcaggactcagcgggtcaccctgttttcaaaagcttcaggcagccaggacaggcagatggcacgtaccaccccctctatgtgagatgggtgctcccaggcctctgtgctctgcacagaagagcagcctgaaaaatccatacagcaagtgactcggtgcagcacccggtgagagcccagcatctccagcgctttatccatcacactcaggacccataagaagccccacacaccaagggcctgtaagtcagccgggctcggctcgcctttccttctgacctcatcatagaacggcctgctctgtttctgtacaaatcccatctcgggatgatccccaaagccccaaggctgagattaattggctttcaaaagcacggactcagcatctggacgcaatctgcctgtcggccagcaggcgtccccagcaagcacctggtttcaagaaggaccatgaagcttccgggttggggagcggcaggagaagccgccggggagggaaggcctcgctgtgcgttcaccctctttcaggagaaccagtggggctccctgaaccagccagctcccagcaggggctggaacagcatgggtgggcatcccatcactttgattttctcattttaaaaatactgagctgagctaacggtgatgttgtaggtttacctgttgtggtacaatgacacatcatggttttcttgcacagttcctggctcataactctcacacgtcacagtcttttgttgcaatgttgggcgtgtcaggcctcaggaaacagaatccttccaggtctccactctcacctgactttccattgtaggtcataagatcctccccagagctcccaccctctaccctgggggaaggaatgctgacttcaggaagcctccctaaacacccaagaggacagggtgtggagaggttcctggggagtggtgggtggggtgtgggggggtcctccaggaagcctcttcccccatatctccccttacgcatctcctcatctgtatcctctgtaataccctttataataaactgttacacgtatgtgtttccctgggttctgtgagtcaccccagcaaatcaatcgaacccaaagagggggctgtgggaaccccaacttgaagccagtggtcagtcagaagttccggaggccaggactcgcgactggtgtcagaagcgggcagtctttgaaccaccattgcaaaattataactcagacagtgaaagagatctgacctaaccaattccatcgtgcttctaacctccaagctctccttgttcattcctgggtgtaggccgaactaagtttaggaggaacttagtttatagtttgaaacaaagacagtaacagccctttcccgaaacaaaccccctttttgcctggggactagactgcctttgtaggactaacaaattagccaaaagattagaaattatggtttagggccaggtgcagtgactggccccggttgtcccagcactttgggaggctgaggctggatcacttgagcccaggagttcgagaccagccagggccacacggcaaaacgctgcctctaccaaaaatacaaaaattaactggggcgtcgcttgtagtctcagctaccaggcaggctgaggtgggaggatcgcttgagcttacgacgttgaggctgcagtgagctgtgattgcaccactgcactccagcctaggtgacagagtgagaccctgtctcaaaaataaaaaaaaaaaaacaaaaaagaaattatggtttaggagtcatgcagctacaggctacaagattctgaccttccccaaattgttcctggggtaacatcactattgtaaaacctaagatcaatcagtgcttgagatattttgcagaccctgcactccatggatcagctggcacccccggattgataaactggctcatccgatcttgtggcccccacccaggaactgactcggcgcaaaaggacaccttcgactccctacgctttcatctccaactcactggccccctacacactaagttatccttaaaaactctgatccccgaatgcttggggagactgatttgagtcataatagaactccgttctcccgcacagccggctctgtgtgacttactctttctctatcctaattcccgtcttggtgaatcggctctgcctgggcagcaggcggggtggacctgttgggtgtttatgtcttgggtgtttatgtcttggggactgagccctcaccctgtggtctgacctctctccaggcaggcggtgttggaactgaaccgaaggacacccgccgagtctgcggcagaactgactgctcatgtgctggtgaaaacctccctctcccaccacatttgatcacagaagtcttcctctgtgctgatgattcttgtggtatcagagtagaggaaaaacagtttgagttttccagaaatacctgtgaataaaatacacataaaataaaatctactaaaaatacacagagaaggggtttctccatgttggtcaggctggtctggaactcccaaactcaggtgatccacctgcctcggcctcccaaagggccgggcgcaggtgtgagccactgcgcccagcccaaatatatatatttttatgacctccatgtataaatatatttaatacccttaacttattattattattttagacagtcttgttttcttgcccaggctggaatgcagtggcgcgatcttggctcactgcaacctctacctcctgggttcaagctattttcctgcctcagcctcccaagtagctgggattacaggcgcccgccaccatgcccggctaatttttgtacttttagtagagatggggtttcaccatcttggccaggctggtcttgaactcctgacctcgtgattcacccgcctcggcctcccgaagtgctgggattacaggcgtgagccaccgtgcctggcctaatacccttaacttataagacacttcctgggactggaaggcaggtctggggtggctcattcactttgtactcaggacagaggactcaatctcagcatcctgagtagctgggactacaggcaggcaccaccatgcccagttaattttttttttaaatttcttgtagagatggggttccactatattgtccagcctggtcttgaactcctggcctcaaatgatcctctcacctttaaatgtactgaatttagctcttgtggcccctcttggattccagagagtgctgctaagccctctgggaggccaaattcagtaatctactcttttgttttgaaacagagtctcagtctgtcacccaggatggagtgcagtggcacaatcacagctcactgcagcctcgaatgcccatctaaaagctacagctcaagcgatcttcccacgtacttataggtgtgaaccactgcacccagcctctcatctactctttaaataggtccaggggacaaaaattatgtacctgtgaccccgtgttttttttcacttcctccactgactgccgaagagtagccacagccatttctaaaactgaaataagagagatgggcagtaggtctgaattctgtcagtggcacttgctggagaagaggggcaccactaccacgaaggaacatgaagggctgttttctttgaacgtgcatttgccaaaaaaaagtgagtaagtgagaaatagaagttgaagtcgaagtcttgtagttgagtttagactttgcggacttttagaaccacgtatacatgtttcatgtgccaaaaacaaagcacaacaaaaaacaaaaaaacttaaaatcagtaaggactcaaaatgaagtagaaacaggtgaacctaacttgattacaagtgcgtaacttgtaataaactcacaggtttttttggtgtttgttgtttgttgagatgggatctcactctgtcacccgagctgcagtgcagtggcatgattatagctcactgcagcctcaaactcctgagctcagatggtcctcctacctcagcctccagagtagctgggactcagacacacgccaccatggctggctaatttattttgtaattttttatagagatgggtgtctcactttgttggccaggctggtttccaactcctcacctcaagcgattttcccccctcagcttcccaaagtggtgggactacaggcgtgagccactgtacccagccagtttttaatatatacagagacacagatatactgaaatagatttgcatgtgtatagtgtatagaaacacgtttcctactctatccattaagaaagccaagaagaaatggcatcccagtagcaatatgtctatctggtactgggatcttggtttctaaacactaccttctaaactaaaaggaaccagggctccttggagaaatgactgattctgggatatgtcaaggcaagcataagataagcctgaattctgtgatgccagaaagaaagaaaatgctcccagaaggttgggacgtgctataaggacagagaggccaacttgaaggggctcctaacacctcaatctggataatgtgagcaacaaagtacgtgatagcgatgggttagaatccatggaataaaaagatgcactaacaccgagaccgcgcccctgcaagccagcctgggaagagatggttctttcttataggaaaatcccaactaataaatgtaggagtaatggaaacagaaaaatcatttaacaaatagcacattaacagttattttggggaaacactcatgggtgctaaaattagtgacagaagtatggttagaaacaagatcttgctgggcgttgtggctcaggcctgtaatcccagcactttcggaggccaaggcgggcggatcacttggggtcagcagttcgagaccagcctgaccaacatggtgaaaccccgtctctactaaaaatacaaaaaaaaaaaaaatagccgggcatggtggcaggcgctggtaatcccagctgctcaggaggctgaggcaggacaatcacttgaacccgggaggcagaggttgcagtgagccgagatcaagccactgcactccagcttgggcgagagagagagagactcagtctcaaaaaaataaaattaattaaaaaaaaaaaaaggccgggcacggtggctcacacctgtaatcctagcactttgggaggccaaggtggtggatcacctgaggtcagaagtttgagaccagcctggccaacatgacgaaacctcgtctctactaaaaatacacagattagctgggggtggtggtgggcggctgtaatcccagctacttgagaggctgaggcaggagaatcacttcaacccaggaggcagaggttgcagtgggccgagatcgcgccactgaactccagcctgggcggcaaagagagactccgtcttaaaaaaaaaaaaaaaagaaaaaaaaaaaagaaaaagagagaaagaaagaaacatcatcttttacatagtggcaagatatttccccacaaaatatttattatttacaaagggaaggaccctaactttatggacacacttggcagacaccacctcagcccccaggacgtgactagcaccaacagccaggggcatcctgtgtctcgtaagacgctgggaagggcacaatttccctgttgaggttttcttgccaaaaatcagtaatatgaaatcaattatgacaaaacatcagagaaatgcccccgaactggggggcattttataaaatagtggactcatcattggatcctggaccacggtaaagtcatccatgaggtagctgctaagcaagaataaatactggagaccagatcatgggatgataccaacatgaacgccagcgtctacatgttgctgaatgaactgtggttctctaagaggtcagcattctaggggctctgggcaaaaggcacacgggaaatctgtgctccttttgtatcctttttctaagttacagataattttttttttttttgagaccgagtttcgctcttgtctcccagactggagtgcaatggcgcgatcttggctctccgcaacctgcgcctctcggtgtggtaccctactttgttttaacctgactgactctctcttagctgagagggccggacagacaccattttggtttcttcgcttgcagccccttgtccccgtcccttaaggacataactggggcaagctgactccaagcacatccaggaatgcgcttactgataaaatactgataagaaactggagcaagctgtaccagcagctcctgggaacgcgctcggttgatggtacccaaagcccctgcgtttatcactttgtgataatttaagcccctgtacctggaactgtttattttcctgtaactgtttctgtaaccatttatcttttaactttttgcctattctgcttctgtaaaaaaatcgcttcagctagcctcccctcctctatttagaccaaggtatcaaaagaaatctagccccttcttcggggccgagggaatttgcagctctagcagtctgtcagtcgctggcaatacaggactcctgagtagtctcagagtgtggcgttctctctataactccctcagttacaacatcgggttcaagcgattctcctgcttcagcctccggagtagctgggattacaggcgtgcaccaccacgcccaataatttttgtatttttagtagagagggggtttcaccatgttggccaggctggtctcgaactccgggcctcaagcaatctgcccgcctctgcctcccaaagtgctggattacaggcgcgaaccaccgcctccggcctttttttttcctctctttttttttttttttttttaaactcacagacactgtaaggctgcctgggcgcggagccgtccttgccggcggcggaacccggggaattctcccggggctgcggggccctggtcggcagcgcccaccgccccaggtcacccacgggagaccgagggaacgctcccgctccacgcggccgcaacccccgccccgccccgccgcagcctccgcgaggggatccccggtccgggcctggccgagctctgagggtcgacctcgcgctccaggtccccaccaaagcgctgcgtccgacaggacggcagctgctggggttttctacaggaagagtggtcggagcggcgccccccacgcctcccacgcctcccacgccgcccgcccgcacctcaccctaacgcccgccagcagcgctggccaggtcccgccgcgttgccacagcgaccgggtcagtcggccgcgtccggctgcgctcggtgcagcgctcgggtcccgccgacaggaaacggggtccctggcgctaggttccggcccctcccgccccgccgggttccgcgctgcgcccgggtccgaggggcgccccggccgacccgaccaccgccgcagatcgaaggagggagcccggcctcctcaccggtcagcggggcgactccggacggggctccgggctatggggacggcgggttccgccgcgcgaggcgcccccaccttcgccgcccccggcccggccgagggtccccaggcgcccgcttcctgaggccgcccggctcgcggtcccgaagggttgacttgagcttttgccctgagatgaagggagcacggggcggccgaggctgcccgtgggggtctgttcgggccgggggcgccacgaagtcctgcctaagggtcggctgcggccaccggggcacgagttcccggcgctgcccacgggctcggagaccggcggggcccaggggccgtgcgcgcggtcgctcagaccctgattagggaactgggggaaggaggggggtcgggacccaccgaggcccgaagtcgcccccaccatcctgtgggaacaacatcctcaggcacagccattcccaaccattcacatcctcagaaaaaggcacgtgtccgtatccatctgcggatggatgaacagagcccggccccgggacagagcagcctggctcacccgaaccctcagcccgcaattctgcgtgggagtggagggggtgtttggtgtctgggaattcccctggtggggcaataagccaggggtctggtgtcatcctccacccacattgttaacactggatcactcctctccgtgccgtgcctgcagcccaggcaccctgcagcctgtcctccccgaaccatgcgtcctggtagagctgtctccctcgcccacagtcctcagtcccgcctcacacaccaaaccctcttctgcctcaggtcctttgcgccagttgcctctgcctagacttggttccctggatgccccctccccaccccatgtgtatgtccggctccctggacccaccccccacactgtgtgtctagccccctggacccaccccccactctgtgtctagtcccctggactcccctccccaccccctgtgtctagctccctggacccccaacctggcccatgtgtccaactcccaggacccccccaccctgtgtccagctccctggtttcccccaccaccccatgtgtttggctccctgtcctgctgccttctcagtgcttgtgcacccccagcctcatcagacttgtcactctattagaacaggatgtagggcctggactgttggctccctgctacccccacccacaggacagtgctggggttgacccgactttggctgcacatttgactggcccctggatcagctctaggactagatgtacccaaaaggatgcccacatccttgcctcagctcctgcctctgcccacccagagagctgccttgcccccatgtccacgatgcagccaccaggcctgggtaagcgtgggtgtccgagacgggctgggacacccagaagaggagccaggacttgcttggtctgtatcccggctctgcatgcctcagtgtccctgcctgtaaagtgggatctatgggaacccatgtgtgggccgggcacagtgctcacacctgtgaacccagcaccttgggaggccaaagggaggatcctttgagctcgggagacagggtctcgctctgttgcccaggctgtagttcagcggcgtgatctcagctcactgcagcctccgcctcccaggttcaagcgattctcctgcctcagcttcctgagtaactgggattacaggcacttgccaccatgcccagctaattttgtatttttagtagagatggggttttgccatgttggccaggctggtctcaaactcctgacctcaagtgatctgcctgcctcggcctcccaaagtgctgtgattacaggtgtgagtcatcatgcctggccaaaaaaaatttttttaaattaaccgggtgtgatggcacatgcctgtggtcccagctacctgaggccaaggtgggaagatcacttgaacacagcacttcgaggccacagtgaactatgatcgcgccactgcactccagcctgggtgacagagcaagaccctgtctccaaaaaaaaccctctaaacctatgtgttatggatagggcctctaagaaggtaattaaagttacgtgagtcctaagggtgggaccctgaactgttgtccttaaaagaagaggaagagacaccaggagtgagcacacagaggagaggccacatgaggacgcagggagagggtgccgtctgcaagccatggagaggcctcaggaggaacccaccctgccggcagcctgatccctgacatccagactccggaagtgagaaaataaatgtcgtttaagccgcccaggctgtggtgttgagttatgcggccctagcaggtcatttgtcacgtcatgggtatctggacctggaatcgtgtgctggcccaagtcagcagcatggcacccatggtcaccccttcagctgagccacatgcccgggtgccccagggacagagcagggtgtgccacgggcactgcctggttcctgaagctgtggggcaggccggtctggccctcacagcctgtgctctgattcgagggccgttccgttgggttgagctccacggtcccagagcgcccgccgtcagctcaggcccgaggctacacctactgaatccccccagcactgcagcacccctccccttccttccctgccccccacactgcagcacccctccccctccttccctgccccccccacactgcagaacccctccccctccttccctgcccagctccccagctgggctccacctgggcaccctcagtgcgggtggccgggagttggctgagggagaccacattcccttcactcctggcctccagcacccagcaggactcacaggtggaaggcagacagggtgtgagccagggcctgggccgccaaaacaaagaaccccaaactggtcctttcttctttcccagttcaggaaagctgaggatgtcggccgggccatggcccctccaaaagccctatgggagaatccttcccaccttggcctcaggtagctgggaccacaggcacctaacccttccagcctcggcacccttggctgcagccacatcgccccctcccgcccctatatccaccatcatgcggcttctcctgtgtgtctgtctccatgtgctgcccttcttaggacgccatcacgttggagcaggaccacccagccaattacgtcggcgatgaccctattcccaagccgcattctaatggaccagcggctacgactggatcctatttctttggggaccaccattcagccctggacctgtgtggggctgacagcccccagtgctggctcccccaggccgtcctgcaaccaccctcatcatgccacgacagtggaggccgagggcccttcctggtgccccggtgagtgacacggccaggacctgaccctcccatgcctctgtggcagagcaaggtgggtggggaactggctgtcctgctcccagctgcgttcctggcacctatgccccacccacccagacacacatctgggtgtcaggcagccgcatgtcactgagtggggtaaacaagggagggtgagaggaaggtcagaaggccatggctgagggcgtaagtgtgggctgaggctcttgcttcccagaacacagactgaccttggtggcagacctcaccatgggagcccccaaaagctgcttgcttgaggcctccaggcctcttgcagggccctaaaagcacagggatccaggacaagaggtgcgggggcccccgcctgggcaccagcctgcatgggccagagcaagccacttcctctcaggtttggggaatgcccacgtcagacttgcagaggcaacttctccatctgtctggctcacaggccctgtggcaggagaggagccaagaaatgaaagggcccggtgggtgtgggcgggccctgctccgatctggatctggccagtgcctgtggcacgccctgctctgtccctggggcacccgggcgtgtggctcagctgaaagggtgaccatgggcaccatttgcctggctcccaggtcctgaggccagagaggagccaagaaatgaaagggcctggtgggtgtgagtgggcctcagtgtctggctgctccaggaggaggggggtgggcactgactcctgcctgagggctggaggcagggaggctcctctggacaggaagaccctccaggaacagaccagcaagactggcactgtccagatgggaccaggagccggacagcggcgtcagacatgccccacagcggccgtgaccacagccacttcctggaggtcaagacctggaggcagggccagtgctgccagggatcctggtgtggacacgggcaggaccaggggatgctccctcgaggctggtgtggaacaggccgtgctgcccagtgggtgggcacccaagggggctccaagccaggctgtcctcccaaggccggcttcgtccagaaggagaggagccaaggtgccccggcatccaccttcctcggctgccttgtccactgcagggacagcagcctgtgagcaggaggtgctttgagggagctggggggaccctgggggacacacggcatttccacactgtaaccacgtcacgtagagaccacaaagtcctcctgtcttggggtaaaagtgaggaaactgaggctggggaagctaaggggctcacgtggcctctggaagggacggggctggaccccggccgccgacagtgtgaaaacagcggttcctgagccagtgttgcggcaaggggcaagggacaggcactgtcagaagccccatgcccctccccaaccccccaggaagttccactgagttctcagtgctgagtcactggctgcggggcctgcggtcctggccggacaggaaggttgggcaaggccttgccctccccctcaggcgagaggcacagatcctgccacacagcccggccccactccccaggcccccggccccataggcctctagccacagcctggctgctgtcctcatgtccttggctctggcctggtgaaggccaagggcacttcagaacctccctgtgcctccatgtgccaggttggggctgggcacgaggccacagcaggggctggcaggtggtgacctctgctcctcgacctgggatgctccaggttgagacgtagggtagctgcagtcccagcaatgacaagctctgggtaaccctggtgagtggacggccaaggcgagcccagcctcagtcactggggggtggacggccaaggggagcccagcctcggtcactgggggggtggacggccaaggggagcccagcctcggtcactgcggggtggacggccaaggggagcccagcctcggtcactgggggggtggacggccaaggggagcccagcctcggtcactgggggggtggacggccaaggggagcccagcctcggtcactgcggggtggacggccaaggggagcccagcctcggtcactgcggggtggacggccaaggcgagcccaggaggtcactggaggaggagaaatgcaggaagaaggcagctgtcaatagcgcaggggtgcacagagccctgaaggagccatgtgtaaggtgccgagggtgtgtgcaggtggagcttggtcagggaggccgcaccaggaccaccaaagcaggtgatacctgaatgatgttctaggccaaggaagagaggacagaggcccggccagggctagagcataaaccaggctggtgctgaccacggcagaagggcagaaggtaccctccggctgtgcgtggagaacgggcagcagggacgagggcctggggccaggctggtggcactggctgttcccgaagcccgtcactcacctgcatctgttccatccaggcgctggggtgggcaggacaccaggatgccaatggctcactgagccgccgggggcaccgctagggcttggggaccacgggacttgccactggacatgggggttgaggataagggagagaaaggctgaggcagccccgtgtgagcccagcaggactgagggtctcggagggtctgggctctaggacgtttcggggttaccgtgagaggaagctcctaaggaccgtgagagtggatggggccaccccaggcaggtgtgggcagggaggagaggagcagggatggggcccatacattgggctcaggagatgcagggaagcccccaagctgcagaagaggaggacacccgggaccaggcagggcctggaggccggggcagcgatggagccctgctgggcctgcaggtctgaggcacttgggggttggcctggaggcctagggagggggtgtggggcagcagcacactttgctggtgccacctgggaaggtgcccacccatctccaaggggcgggggaggagctagtctgtgcggtgagggtgacactgtcccagtcaccctcccctagacagcagggaaggtccggtcacccccaggcacttgcaggccgtgggggctccccaggagccagtggccgcccgtagggtctcgcaggccagaggcctcgctccctgggcctgctgtgtctctggaggccccagctggcagggggaccaatggggcccttccccaccgcctcccaggtgccggtggccgcccctgagcagggggttctggggcccctgcctggactgctcccccactgcttggccccgcctctcagtctcggacttggggaggagcagccaggccaaagggtgcaaagagggggctggggggctgcactgaaaggcggggggtctgcgctgagaagggtggctacaggcgagcatgggctgcgctgttcccacccagccttgagttccagtcttgactcctctccttccacactccagtcctgcctccatggcagacccagggccgacgtgggctccaaggagggcagaggaaaccctgaccccccagcccccagctcaagaggaggcaggggtgggacacagggcaggtggagcagagaaaggcgaaaaaacgcactccaggatgctggacgctcagggccgggggggccctttcacagcaggttgggggggctctcagggccacactttgcccagcctccaaagggctgagccaagaggagagggcagtgtccccacccatccagccacctgccaccccgatcctgggacagagttgtctctgttggcccagtgtggcctggacaccctaggctgggctccacggccaccccaaaaccttcttgccaaggaaggctgttcctcccccagtgcccaggagagctgcctcctgctccatgtctaccactgaggcctccagctgatgacctcctggcctgctgaggcttgaatgttggggccaaggggctggggtagggctccactccaccccaggagtgggaaggggagacccagggcaacctctggcctcacaggcagcccctgcctggcacacccactccagcttaaacatggaagcaggctgatcacactgatttttgtccttaggaaagtaatagattccggccaggcatggtggcttatgcctgcaatcccagcactttgggaggtggaggtgggagaatcacctgagctcaggagttcaagaccagcctggccaatacagtgagatcctgtctctatctaaaaaaaattttttttaagtaaataaaaaaagaaagtaaagatctcttccacaaaagtgctggggcaactggatatccacatgcaaagaataatgctggatccctatctcacaccgtttataagtatcaatgcaaaatagatcaacaaacaaaacataagagctaatatcacaaaactctcagaagaaagcataattaattaattaatttaatttatttatttagttttagacagagtctcactctgtcacccacccaggctggcatgcagtggcgcaatcccagctcacggcaccctttgcctcctgggttcaagcaattctcgtgcctcagcttcccgagtagctgggattacaagcatgcaccaccacaccgggctaatttttgtatttttagtagagacaggtttctactggccaggctggtctcaaactcctggcctcaagtgatctgcccacctcaacctcccaaagtgctgggattacaggtgtgagccactgtgcctggcccagatttttgatatgataccaaaaacacaagcaacataagaaacaaagatacaattttgtgcatcaaaggagagtgaaggcagcccacagaatgggggaaaatacagaccatatatctgttaagagtttaatacccagaacatgtaaaactcaacaaagggccgggcacggcagctcacacctgtaatcccagcattttgggaggctgaggcaggcgagtcacttcagctcaggagttcaaagaccagcctgggcaacatggtgaaaccctgtctgtacaaaaacatacaaaaacattagctgggtgtggtggtggtgcttgcctatcgtcccagctacttgggaggctgaggcggggaagactcgtgtgaacccgggaggtgaaggctgcagtgagctgagaacgcaccactgcactccagcctgggcaacagagtaagaccctgttccaaacataaaagagaatgaaactaaacaacaacaacaaaaaagacaacccaataccaaagaagatacagaatggccaacaggcacatgaaaagatactcaacatcattagtcattagagaaacgcaaatccaatccatcatgagatactacttcacacccacgagcacggctttaatgaaaaacaaacagggctggtgtggcagcacgggcctggagtctcagccaggcaggaggcggaggcaggaggatcacttgagcccaggagttcctgcctgggcaacataagaagaccctggtctctgaaaaacaaacacctcccagaaaacctccacataaaataacaggcgctggtgcggatgtggagaaactggaacccttgaacaccctgctgagaatggagatggccaaagcctccgtggaaagcagtgtggtggctcttcatggacaggagcgtcgccctgggacccccaactccgctcccacgttcgtggacaggagcctcgccctgggacccccaactccgctcccacgttcgtggagaggagcgtcgccctgggacccccaactccgctcccacgttcgtggagaggagcgtcgccctgggacccccaactccgctcccacgttcgtggagacgagcgtcgccctgggacccccaactccgctcccacgttcgtggagaggagcgtcgccctgggacccccaactccgctcccacgttcgtggagacgagtgtcgccctgggacccagcaactccgctcctacattcacaccaaagagaaacgaagacatctgttcacacaaatactggcccaggaatgtccgtggcaccactgttcacaacagccaaaaggtggagatgacccaaatgtccatcaacagatgagtgaagaaacgaaacgtggtccatccacatgaggaaacatcattcagccgtaaaaaggtatgaagaggccgggtgtggtggctcatgcctgtcatcccagcactttgggaggtcgaggcaggcgcctcacctgaggtcaggagttcgagaccagcgtgaccaacatggtgaaaccctgtcgctactaaaaatacaaaaattagctgggcgtgatggtgcacgcctgtaatccagctactcgggaggctgaggcaggagaatcactcgaaccagggaggcggaggttgcaatgagccgagatcaagctaccgcactccagcctgggggacaagagcgagactccgtctcaaaaaaaaaaaaaaaaaaaggaatgaagcactgatagaccctctcccatggacgaacatggaaggaagacatgatgctcagtaaacacgctggtcacaaaggccacaccctgcagggctccattcacatgaaacatccaggacaggccagtccacagacacagacagcagatgggtggataccggggaagggggggtgctgtgggaaggaggatggggagcaattacttaatgagtgcacggtgtttttaaggggtgatgaaagagttttgaaactagacagctggtggtggacaacaacgtgagcacgtccagtgctgctgagctgccctctaccgtaaccgtgtgctacaagagctctaccttaattaattaattattattattattatttctgagacggagtttcgctctttgttacccaggctggagtatagtgtcgcgatctcggctcactgcaacctccgcctcccaggttcaagcaattttcctgcctcagtctcccaagtagttgggattaccggcatgtgccatgacgcctggctaatttttgtatttttggtagagattggccaggctggtcaccctattggccaggctggtcttgaattcctgacctcaggtgatctgcccacactggcctctcaaagtgctgggattataggcgtgagccactgcgcctggactatttatttatttacttatttattttttctttttgagacagagtcttggtctgtcacccaggctggagtgcagtggtatgatctaggctcactgcagcctccacctcctgggttcaagtgattctcctgccctcctgcctcagcctcccgagtagttgggattatgggtgcatgccaccacgtgtggctaattgtttgtattttttggtagaaattcggtttgctgcacccactttacagagcaagagactgaggtccagagaggtccccacacttctttctttccccacttgaccacattcttggaatgaccgctcaggatccaatgagcattagttctgaatgttccagcagcattgaccctgtctcagttctgtctcccagtgacagagcgagaggtcactgaggacatcaagaagacctggccagcacacgacagctgctctcatcagaccatgcacacctacaccccaacacctgtgcacagacacccctacacctgtgcagacgcacccctacacccgtgcacagagacacctgtgcagacacaaccctacacccgtgcagacacacccccacacccgtgcacagacacctgtgcagacacacccctacacccgtgcagacacacccctacacccgtgcacagacacctgtgcagacacacccctacacccgtgcagacacacccctacacccgtgcacagacacctgtgcagacacacccctacacccgtgcagacacacccctacacctgtgcagtcacctgtgcagacacacccctacacccgtgcagacacacccctacacctgtgcagtcacctgtgcagacacacccctacacctgtgcagtcacctgtgcagacacacccctacacccgtgcagtcacctgtgcagacacacccctacacccgtgcagacacacccctacaccttgcagtcacctgtgcagacacacccctacacccgtgcagacacacccctacacctgtgcagtcacctgtgcagacacacccctacacccgtgcagtcacctgtgcagacacacccctacacccatgcagacacacccctacaccttgcagtcacctgtgcagacacacccctacacccgtgcagacacacccctacacctgtgcagtcacctgtgcagacacacccctacacccgtgcagtcacctgtgcagacacacccctacacccgtgcacagacacctgtgcagacacaaccctacacccgtgcagacacatcccaacatccatgcacagacgcaccccaacacctgtgcacagacacaccctcacgcccgtgtacacccccaaccccacataaccggccctctcataaccctacaccatgcatcacacccaaaccccatgaccaacacccaccacaggcagcagtgtggtgggtcaggccccactgggccacggtgcggcttctcctgcccttttcacctctgccccctacctgggctgccactccctgggaaggaccagcagccaggttaatatgtatttttctgactttgggaggccaggcaggtgaatcacaaggtcaggagttcaagactagcctggccaaaatggtgaaaccctgtctctactaaaaatacaaaacattagctgggcgtagtggcaggtgccggtaaccccagctactcaggaggctgaggcaggaaaatcgcttgaacttgggaggcagaggttgtggtgacccaagaatgcaccactacactccagcccggtgacagagtgagactctgtcaaaaaaaaataataataatatgtatttttctgtgagcctggacaggttctctggggcgagtgaagggagggcgcagatttgggccatggtcctggtcctgggtctaggctctgtgtggtggagggcaccagcctcccctggcaccgtcctggctgcatcccccatccagcctgggcacgtcccgccacacgccccgcgtgggtctggagtctggggacggtgtggccacaggtgtggaatgacaggctgtgacagttgtgtcaccagatcctctgggcagggagctgtaaggcaggcagggtcaggagctgggcagcccaggaccccagggaggcggggctgtggctcggccggaatgtccttccccgtgactcggctttcttcccctgacccggccagtcctggccccagtcctgtccatggggcggcaactggtgctgggtggtacggccaagactgggtcaggacggggtggccctgctgggatctggaaaatggtgtgcggggttcccaaggacgcaggatgtgggctgtgtggctcccccgaccctggaaggttccctgggacctgagatctggccctgataggtccgggggcctgttctgccaccctccctggggcagcggctgtggtgacccttggagaaaagcctctccgcatttcctaagtcatttcaggacacagaggtagggactctcggggcagcccatggggaggaagcagatcccagcctccccttcctgcccgcccccctcccacaaaggttgctcttggaaaaggtgggactgcgcaccccagggagcttaagcctgccagggagcagggtgggaaggacctgggggccaggcccctaggaggacattccagggcctggagggccctgtagctggaactgggaacaaaaggaagttggggcagccaggggcaggtggaggcacctgggtctgggggagaagtcaagactgggggctgtggggtcagaggggggcgtcctgtgaagctgctcactggccagggatggtgccacctgtccacacccccacctcctttcctgcagaaaagggcggcctgggcctggggtctgacccagggccactgtgggggagcaagcgttggagccaggtgtggggtgggtgctcccaacaccacccagagtggggtgcagagatgcggacacacgtggcctttcccaccccttcccgcagctccagacccccagcgggccaggggatcgcaccatggccagaagtgcctctcccctgcaccatcgctgtctctgacacatccagggttgttgagggaggggcatgacccccagaaggcatcttacccgaaaccaaagtggtattccgtgcccaggtgcccctggagccctgtgtcagatggagcctggccacctgggccctggtgccaggcctggaatgccccccgccaccaactgctgggcctttctaaaagctgagcacttggaggtcaggggtacctcatgctaccggagtgccagaatcctcggagaggggcccagggtctcggaggctctggccccaccccacagcgtcctgttctgtccaggctccgggtgagctgtcccaagtggcctgcttgatagctgcgctgcctgtttcctctgggtaacaacctggcaggcccccagccccagcccccagcagccatcacatcactgtgaccactctgtggtcttccagtccccccagtcaaagcccacagacttgacctctctgctgggagccagtgctgactggcctgcctgctcccctcccctctgagggcagggaggctccaccccagctctgggtggacagtcctggggcccacacccaggggaagccatgcctaagagggggccaggcctgggggtcagaaccaaaccacaggtgctccctgggacccctggagggatgactgggcgtcttcccagctgggagaaaacctggccctggcaggggcgcccctttgtccttcaggaggcaggagggggcagtgaggtcccaggctctctggctctgtctccctccccctgttgctgctctacggtgggggttcagggttcagggatcagggccaagctgtaggcagatgtggaaggtgtctcggtggcttcagtgggggccccaagcccagctggcaggcctggtgactcaacaatctgggatggggagcacggtaccctcgcctccccggcaggcaataccccataggggacccattcccgcagctgtccacggtgcctcgcacccctctgctgctctccctcctcagaaactgatgaatcgcctggtgcaggaagatgggagcaccacctgccctgggcgggagcaccacctgccctgggcgggagcaccacctgccctgggcgggagcaccacctgccctgggcgggagcaccacctgccctgggcgggagcagcacgggccaactaagtagagtcttcatctgtgaagttggaggccccctcaccacttgccacaggcctgtgttctgctcacaggcacgtgccctcatcttgatgtttggggatgggggtggttgggccccaggtaggggtgagggccagacccagcctctgtgaatgccagcgggagggtgggcttgtaacattacatagaaagaacaggcggccttactggacctgatgtcccgcaaggctgggctgcagatggagagccaaggcccacacggcctcactgtcaggggtggcctccccttgccctctggaggggtcctccattgataccccctgcctcctttgtgtgtgaaggcacgggcttaccagtgcctcggtccccgaagcccccgggtccgggaggggccagttaaagcattcctgtggccctggcagggtggccctgacaactagactccttggtccaggccaacaaaggccttactccctggagccacctcaaacctcagcacccaaagcggcccgttatttccatgttgcaaatgagagaaaacaggctgggagaagcacctcacgaggtccagcgggtgggcagccctcgcctccccgaaggtgggagccgccccggcctccgcgtcgggttctgggccgcgagaggggcggggcaggggcgcagggctggagtcggtggctttgtagggccccgcagggcgcggagccacctggggaaacggaagttcagggagggcgaggccgtgccccacatccaggcagcgcaggccgcgggccgctcccctagccaggaagagccgccgtccgcaccgggaccggagaggaagcggaggtctgaagggggacaggtcggacgtggcctcagagagggaggatgtgggccccggagctgagccaggcggccggaaccccacgggacccgcgcgcacctccccaccaaaggggccccggcgttggggggcgaggggtcgctgccctggaggacgttgggacctgccgcgctgcgctccgaggcggggaaacggagggacggcggggcggaggggcgaagcgagcctggactccgggggaggcgaggccgggaagacccagtcccgaggagcagagggggcgggccagctccgggccgggggcgccgacggggccggttccggttgggggggtccctgggcccggcggggttgcgggacgcgccgtcggggagctgcggcccgggagcccgtccggaggcggcgcggggtccgggcggggcgcgcaggggcggcgccaggcggtgacgtgcgcgggggacgtgccgcgccagcgacccgagcacttaaagtcgcccccggcgcggagcggaccggcagaggcgggcagaggcggcgagaggcggcgagaggcgggctgaggcggcccagcggcggcaggtaggcgcggccgcgatgctcgcgcgcgggccggggcccaggagctcccccgtgccgggcaagggggcgacctcggggtccgcgctctcacccccaccccgcccactttgtccatcaggtccgggggcgcccggggcatggactagccttctcgaccccgagcgggccccaccgagggctcccgagagccagccgcgcccctccgcgccctcgcatacctggctgcccagtctcgtctcccccggtccggcccggcgcccacccgtcgggctgccctcaggggctgggctcgggccaggagatggctgcgccggcggccaagcccggtccgggtataaatagctcggtccgcggtggcggggggcgcgggctatatttggtggggctgctgcagccctccctgtatgggtggcctccccgagggagtggggagcacttgcgctcgggccgtggcgctttcccctgttcgcaacaccctgaacactccccgacccacacccgcccttgggcaatgactaacagcccgagaccgtgcagggaagtgggggaccctctccagagccaggctgggctccctgggttcgccctacctccacccctggcccccagctcgtgggaaaaccaggcgcagcctttggtagcctcccacttcctaacccacgcctcagtttccctatacgaaaagtgggttggtcaggagcctccctgggtgttgggccagtcaagagacaggagccgcagagtggaagggaagcccttagctctggccggggcctccaggggtggctggagtcggtgagggacgatggggggagccgaggggcggctgtcctcctctctgtcccagaggcatgggctgaaagggtccctctcctggtgatggccagagtcaggcctgctgggcgggaaatggcagttggcccaccccaaggcccaggggcttgtccatgctgagcacaagggtgggaggtcttgtgtctgttggggccggggagtccaaggtcccagcttcactgcacaggcctggaagtcaggtgggtgctggcctgaccctgctgaaggagggtctattccgccagcgtggtgtggaggcggctgggctcgactccctcatggagggaaggaactgaggaggtgctaggaggccgtgggggggtgtctgcccccagagaggctttgagtgcatgggggctctgccgtggcacgtgcagcgtctgtcccccagggccccatggtgtggacagagtctggggtgggcacctggaggcctggtctcaaggcaggcttggtaacgaccccatgtgaccttgggcagggcccgccatccaggccacccagaaagccatgtggcctgcacgatcaggccagaccccactgactggagcggggcactttactttggaggggcagctaccagagggctctatggatcccagcccagccgtcaggccggacgggtcccccctactggcctgcagtgacccttatgccaggctcggctggctcagcggtgggtcctggggtgacctggccacgtgggacagaagggcctgtgccgctccctccagtgaggtgccaaatgtgggccacactctgggccccagcgggggccttccgggcagtggcgcagagccattggaggtgcccgggccctggggcaggggcggggcgggagcagacagagctcagggcgtcctcctagcgtcacctgcccgagtcaggcccatctgtgaaatgggccacgccgggcagccgcacgcaacggaaccgaaccgccgggctcctgctccgagacccgcagttcacgagtcgacgcccccgagtcccgagccgcgcccactggtcccacctctgcagcaagtggagtcggccccgccctgtggcttcgaggccccgacgcctggcgcggctcccgggctccgctgaccccggtggacccgcgcgccggcaattacggtagcgtccagtagggcgcctactgcgggcaatacgggggctcctcccatggcgcggtcacgtcccccacgtcccgcggctggcggggcggggccgggcggagcatccttccctccccctcccccgggtgggccccgcccagcctcgaccacccgcgccgacccccgcccgcagagccgggaagccggaacccgcaggcgccctccagccgtccctccggcccgggcggggattgcgccgaggaggggcctctcctggcgagggtggagttttgggttccccccttcgccccgcacctcccgccttcctgcctcctcccggtcttcaccttcccccccgggtccccacgacgcccgctgggcggcggtggggtagggggcgcctcctgacccgactccccttccagccttggccttcaggcactggctttagggtggaggggcggccttgcggggtccaggaggcctcggaggtgggggacggcggctctggaccagctccggcccccaccacctcccggccccagggcggtgacagccttgcggagaaggggtcttcaaagctctgagaccccgcagtgccagctcaggattgaagcctgcggcggcacatgcagccttcctttcccaaaggggacttgcgcccagccccacttggggcaccagtgggggctcctggccctggccctgggtgggagtggccaatccgcaaatgaggcctgtgtgtctgccccgccggcccctgccgtcgtgatgtaagcggacacagagcggcagggcacgggctgcgcgaggggtctgcgggggtcagaggtggggcgcagggcccaggcctggggcagccccttgcgcagcgtccaccccctgcaagctcggccccgacacctttgcaggcgcctggggcggggctgccgggagttgctcactgctccttccttgtttgcacaacaggggctgcgggggaagaagggaactgagggaggcccctcccccggtgcagcgccctcccgccctcggcacccctcggcagccaggcgctggccacagaggccgcttccttggtcctcaggcagctcatgggatccaggaaggaaacgaattacccttttcctgccccgcctcctgcctgggccacaaaggcagggccaaagcccatccttcaagggctggagtcagttaggtaacaggccacgggccccgggctcaggccactgcacggacccagggaacgggctgacagtccagcagaggcctcagcgaggcggcggcgctgcgcacaaacctgaggacctaggcgggtgaggggtctgcaggtccagacgcctgaggggaagcatgccagggtgcccagtgccccccaaggtggtgggcgaggtttctggagaggtcccggaggagcgggcttgggcagcaggggtcaggttcaggaccctctgtgcatgagtccaggttgactctgcaggacggcatttcgagccacctggcatggcgttccaggcctgtgacggggcagtgcaggggtccgaactggcaggcacccaggtcctgaggacttcatggtcgaatcctggtctaaagccaggggtccttgcagagccctgcgccctgcaccctcgagggaactgcctgcaggagcccctggcttgggagggcgcatggctgtgggacgcagggtctcctgcaagggactttcccacccacccctgccccaggcctcccgctcagcttccagcagcctggggtcgtagagcctttgggggacctgctctccgggcagcccccacctgggagatcagctttctcatcccagaggccaggttatttctgggtgggttggcatgcttcctggggggcggcggggggggggttggtaaatgtcaggggaaggccagcctgtggcgtgtgcccacggagaggccaatgcttggtggctgtggcgtgtgctccaggcaggacagccccagggttgtccctggaacaccgggcagtctgtaccttggcccatcacggtgccggggttatcctggaagatggggagtgtgggccattattttgtgccccttccccgtactctacctcctgtggaatcccttgccccaagccatgtgggcagacagctggctccaagtcagcccctggacaccaggctggagtgggaactcctggagccatttcagcatggctggcaccacaggctgggtgaggacagacgatggtgccaggttgtggtctgggggcttgtccaaatgcctcatcttgacacagaagatggccctccccacatgagcgtcacgtggaagccacaagcacctcaggtctcagaacatgctgtgctctcctggtcagtgagtcctggcactgccccaaccctctgccagccctccttgacactaattcaggggcgccgcgtctcctgagggtggccactgtcccctgcctccccacacgccctcgtctgtctcctgaggaccctggcgggcttcaaaccctgggtctgcctgcgtctcccacccccgctggtgcagccagggagactcagaggccttggtacctctttgtgttttgcagggggaacctggggtatgcaaaatgtgtctattcctgtttgttgtatacacatttccttccttggccttgcatggcctgtttatttttaaaagtgcaaacttgcaaccccaaacaagctggggccctgaggccgtcaacccctccagtctcccctgtgacccgcagtctgcgtcctgttcccagtttcattcctcaagtgcatatatttttatttttttattttttttttgagacagagtctcgctctgtggcccaggttggagcgcagtcgcgcgatctcggctcactgcaagctctgcctcctgggttcacgccattctcctgcctcagcctcccgagtagctgggactacaggcgcctgccactgcgcccagctaattttttttatttttagtagagacggggtttcaccgtgttagccaggatggtctcgatctcctgacctcgtgatccgcccgccttggccccccaaagtgctgggattacaggcgtgagccaccgcgcccggcctcagtgcatatatttttaatatcttgtagttaccctgctgtatactgtcatcttagggaccttttaaacaataccagtatgagcgggacctaccctgctgctcagtgaccccaggcagtgtgtcctaaggtggtgtgtcctgaggcgtgcgacactctgtcctgtcccaggcactgtggtgggggcatccggtgtccaggtgcagaggcaaaagctgctcccgggtttcccagaaatggttccgaggcctgggtcccagagagccagtgcaggttggggggtggacctctggctctgtgggggggtctgttctgctccagtgggccgtgtctgccttgtcatcatccagacagccacagctggctcctgggtcccctcgtcaagcagcatttcccagtaacagtgacttcgtggaacacttaggaagcccttaaaaaccatcctcggacctctgaggcagggactccagggggcacagcacctgtggtggggacaggcaggcaggctggatgcggggagggcccgggaggaggagtgaggagccacgcacggaactgctcagactctcccagcaaaggtcctggcccttgtgcatgcctttagttacatgtctgccttagaggcaaagacgagccgtcacgggggacccaccgggtcaggggtctgcggacacgcttgcaggaggaacccaaggaaagggggtgggggtggagccccacagattgcgtcgtgggtgggcgtggagcttgcacagcaggcctgctgctgcctcccagggcgctggttcacagcacggtcccagcagggagaggctgagccggttggactagaccacccaaggtctcaggttgcagctccctggtgaggagaggacaaggtgacttctgggtggggtggggcatgaagatggaagtctgacctcgggttccaacttgactcaaacgagctgagctcctggagtttagaaagggacaccagcttcagacatcgtgggggctggcatggtttgctctcgtgggctggatgggagcctccctagcccctcctgatttcaggctgcagcctatgggtcactccaggcacaggtggggtgagtcaagatctcactggaggagtcactgagcaagagggccggtgggaggcaagggggcatccagggacaaggggccagctctgcccccacttccccaccccacccactctaatactgcagcccctgtgcttccaactgccccctccagcctggggcccagcccctcaccgccagagactgcccgcctcctcttgggcaagctcctggtgggctccactgaagccaaagtgggcccttgggggcaggagagccagagcaaggcacgctccacctagatttagaccgggagagacctggaggatgccaaccccagaggtcctggggcgagctcagtgctggggaccggaggtgccgtctgctgccagaatcatggtgtgcgtggtccctgcccagcacgggtcagccagagcgagccagggcagaaatgacggccaggtcgatgttcctgtcgggggctgcttgtcccaggaggtaatctgagtcctggccgagcccaaaaaagccactgccctttagagccagctgtgagggtgcaggaggcagtgcagagggagtgggacccacagctgctagcctccctccaaaccctcctgcctccaccagacaccaggtcagggggccacaagtgtgggtgccgggcagctgcccctcagctgagctgccgggccacccagctcgtgtccctcccctgccaggctgcagctgggatggtcacccgggcagcctgagtcagcctgctttctctctcaggtgaggcggaaccaaccctcctggccatgggaggggccgtggtggacgagggccccacaggcgtcaaggcccctgacggcggctggggctgggccgtgctcttcggctgtttcgtcatcactggcttctcctacgccttccccaaggccgtcagtgtcttcttcaaggagctcatacaggagtttgggatcggctacagcgacacagcctggatctcctccatcctgctggccatgctctacgggacaggtgagggtggcctcacaccgggccccctgtccggggctctgctggcggatcctgctgggcgcgtgtagctgggctcagcaacagggccttccgcctgctccccagggaaccctggagggaagcccttggggccaggatcctgctgggcagcaacatgctctccacggggccaacccaggcagggcgcgaagtccatcctggcccctgtccaaacgggtcggctgtatttatagaccgtctcagaggacaggctcctgagagccgttcctgaaaaggtggctgttcctgagctgcagggacccaaggggcccagcaggcggcgctcacgtgtcatcatggcctgcgctcggggagcctgcccacggggtgcccctggtgccccgcggggggaggggtggtgtgggaaggggaggccggctccaggctgtgagctcagtcggctggcgggggtagagctggctgcaggcccggcccctctcagctgctgccctctccaggtccgctctgcagtgtgtgcgtgaaccgctttggctgccggcccgtcatgcttgtggggggtctctttgcgtcgctgggcatggtggctgcgtccttttgccggagcatcatccaggtctacctcaccactggggtcatcacgggtgagtggggccggccggtgggccgcacgtgccaggaggggcaggggccgtgcacttctgctcctgggtccaggcctctggaggacagcagggcgggtggctgcggggtgtcccggccccacctcgttgtccccctctcgagtgggtgggtggcaggggctctgcaccctgggagcctgagcctgtgggaacctgggggcagagatgagggtctcgggctttggggcagccttggggggctctcaccacattccctttcctccagggttgggtttggcactcaacttccagccctcgctcatcatgctgaaccgctacttcagcaagcggcgccccatggccaacgggctggcggcagcaggtagccctgtcttcctgtgtgccctgagcccgctggggcagctgctgcaggaccgctacggctggcggggcggcttcctcatcctgggcggcctgctgctcaactgctgcgtgtgtgccgcactcatgaggcccctggtggtcacggcccagccgggctcggggccgccgcgaccctcccggcgcctgctagacctgagcgtcttccgggaccgcggctttgtgctttacgccgtggccgcctcggtcatggtgctggggctcttcgtcccgcccgtgttcgtggtgagctacgccaaggacctgggcgtgcccgacaccaaggccgccttcctgctcaccatcctgggcttcattgacatcttcgcgcggccggccgcgggcttcgtggcggggcttgggaaggtgcggccctactccgtctacctcttcagcttctccatgttcttcaacggcctcgcggacctggcgggttctacggcgggcgactacggcggcctcgtggtcttctgcatcttctttggcatctcctacggcatggtgggggccctgcagttcgaggtgctcatggccatcgtgggcacccacaagttctccagtgccattggcctggtgctgctgatggaggcggtggccgtgctcgtcgggcccccttcgggaggtgagcgctgcgcccccaggcagttccccacacctgcccttcccgtcagacgcccgctttgcgaggggggggacgcgcacccctcggcagccacccgcagtgtgggactcagagctggagggggtgcactgtgctggaccaaccctgattctgctggggctagcgggtctccattaggagtggggtgctccgtccggcacagtgtgtccagacaggcagggtggctaggggctgggcccgggggggggcagctcctccaggctctgcctgggcaccacgcggcagctccaggcaacccaacagccggcttttgcattttggggcctctcctttttgaaggatgactgagctaacacgtgagggaaattaagttctgactggagcagccttgcccaggctccgcctgcctggcgagggggtcctgggcttggggagggctcatgtcttggagtccgcggtggccagggcacagggctggtactgaacacagtagggcttctggggctgccgactggaagcctcagggggactccgtggggaccagcgtgactcctgccaccaaccgaaacccaaactccacaaagccattgctatttttagcctcttaagtcttggttcccctgaggaggagggaggatgcccccagctgaaacacatggaggggagagaacacctcccagccccacaagctcagaggcagacagggtgacccttgcgtgctgagacaccgagacacaggcttgggtggagccgtgggccctgggggcagcccgcatgagcggctgggactgacggggtcttcccgcaggcaaactcctggatgcgacccacgtctacatgtacgtgttcatcctggcgggggccgaggtgctcacctcctccctgattttgctgctgggcaacttcttctgcattaggaagaagcccaaagagccacagcctgaggtggcggccgcggaggaggagaagctccacaagcctcctgcagactcgggggtggacttgcgggaggtggagcatttcctgaaggctgagcctgagaaaaacggggaggtggttcacaccccggaaacaagtgtctgagtggctgggcggggccggcaggcacagggaggaggtacagaagccggcaacgcttgctatttattttacaaactggactggctcaggcagggccacggctgggctccagctgccggcccagcggatcgtcgcccgatcagtgttttgagggggaaggtggcggggtgggaaccgtgtcattccagagtggatctgcggtgaagccaagccgcaaggttacaaggcatcctcaccaggggccccgcctgctgctcccaggtggcctgcggccactgctatgctcaaggacctggaaacccatgcttcgagacaacgtgactttaatgggagggtgggtgggccgcagacaggctggcagggcaggtgctgcgtggggccctctccagcccgtcctaccctgggctcacatggggcctgtgcccacccctcttgagtgtcttggggacagctctttccacccctggaagatggaaataaacctgcgtgtgggtggagtgttaggaccaacggtttcctaggagtatgtggttttgctgtgtggcctgtgtcctgactcgcacgtctgctgatggcctggctgttcctaccgtggctctgtcctcgccagctttccctgcagcggcatagcattcgtagcaggggcaggcgctgcatggagggggctgcggggcaggtgcctggaggccgctgtgccagggtggcctctgaaatgtgccagggagcccctacgtggtggttagatgggagctgaggtggaacaagccactttattcactgctgtgtttaagaaacaggaccctcctgccttccctttttcgcccctctgcctggctggcagtgtgcgtggtgtggtcagtgcccagggctggtctttgcaccctgtcctccatccagcccggcccagcgcttgggcttgtcctggacacctaacacccacctgccctcgtggccagcagtggcctgcgtggctgggagcccggtcagaggccgccggggccctcagtaggtgcgtcgtgggcgctggggacggcagcgggtgccctggcgggccgcgtgcagccggagagatgccatgtccctgctcctctgcaatgaaaagcaagcgaaaagtgcacatctcaggtccagctgtccccatctgcccctggccttgcgccagctgggcttgagctcttgcagcccaggctcctgcctgcagcctcagggctgtggaggcctctagcagggctcaggctggcgggcagtgccagcagttgcagggatcaaggtcagactctgcacagctaggcccatgtgtctcggcagagtccaccagtcccacccagcagctgaagggagaaagacgaggaggcagggagcagacgaggaggtggggagcaggcagcccgggcctcagaggacacatggccttcccccgctggcacccccacatcagggccaccaggggactgctcacacccaggggttgccgcctctggacctggctgtccctggttctgctgacctcaggagtgacctgggcttacagaggtactggcagggaggtcatgggccgggtgaggggtgctcgctcctggaaccctgtttccaggtatctcgggccctcaccctcccctaggcaggaagcagtctctctagctcaactgtcacccctcgtctgccccactctggtccccacacccacagcacacagcagaggctcaacacaaagtagccaggcagtgctgctcccggacagacatgcctgagggaccgtgctcagtgattcaggagtggtccagatgtgggaaggcagccacgcttggttgggggcacaggacgtgtgggggctggggtccctgtgccgcagggtgggcgtgagtgggcgctgagttctactacctcctccctcagctggtgcctttaaaggagggaagccatggggcagtgggtctgctctgacccgacaggcaggagtgaaggggaagggaagggaagcccggagcccactgggaagaagctgggggcagaggtctggtgcgtgggctgcagagctatcccccaaccccggcgacagattctagtgccaaaagtggttcaggtctaccgtgttgtgaagatcccctgaccagagacacgtccgtccagaacccactgctacttggggtgggggtggggggcagagggcgcacagacttcttcacatgatcccagatcagagggagaagggaggtgtccgcccggcctgggccttcccagagaacagccctggaacagatgtgtgcaaggcctgtgccgggggaggtggcgggggaggcacaggggacccagaaagggcttggtggccccggacgctgccgtccctcagccttccgaggggtctatggtgaagctcccgggaggcgctgcccagtacctggagggcctgctcttttcagcgtctaaaccatgcctgaggacacagacccagccagactcaggttcagagaacaagccctctaactctgtccgctcatgcccccgcagatgagatggaacaggccttgaggacatgcagcccctgctccctctcagggcagggaaccccaggagggcagctgcaggcctgggaagctcaggcaggaactggaacttgggtcttgccgttttccggttggggccggtgagcggggcaggggctgagcctcacccacggccacagtgaggccccacacggtgtctcagtctggggcagcaagagggaaccacgtgaggcgggctggagacagggaaggcccggaagccagctcagatgcccagggcacagccagaatggctgagaggaagggcctgggaggaggcaaagtctgggcaggaggggctggcagagctccaggccatgggcatccccacggttggggaaggagtgcatcacaggcagagttggcgggacagccccggaacgtggggctcagaaagctacaccgttcttagagcaacctccaggcaagtgacccgaagtccctgtgctttttcactacaaacaaaaatatcctcctcttaggcagcgtgaccctggccaaggggccaagggagtggcctggagtggagagtactgggtggaggtgggggtgggaggggagctgggaggggaggcggcctagcctggctgagctcacccacacacgagcacaggttaggagttggtgcagacctccctgctctggcagcctgacagcccccgcaggccttggataggggccactgctgtgtgctctggggggggggggaagaggaaccctatctccttgtgcctgtgcagggccatcgggcagctcctgggcttcaacagctcaagcgacagggggatccctgagcaccacggccctatggcagggggaagggacatgcgctcaccccaggcggctggagtgcggctgccggtgccgcccgagaaggcagggactctccagaaccgtcacacagaaagtgcgtggacttctgtgtgcacaacagagcccaagggggcagcacggcgaggagcagtcgccacccctccctgcccggcagcaggcccagggggcagctctcctgctctgccagctcccagacacccacaggctgagaaagaacaaacagccatctcaaagaagtattttcacacagttcacctcaacacagtgaaaactctcaagctgatgaaataaagaccacatggaaaggggagggaagaaaggtagaagtcattatgaatttattatttacacgattgttaaagtacacaaatacagtggcgatacaaacgcacagctcggagactggccgtcagtgcacagctgacacgacgtcctacctacgtctcctgcacggggcgacggggactagatactgggcaaggactgtcacaagcactccgaagacgcgacccggcgaggctcgggctggaacccgggcgcagagctgcctcgcacaaacgttctgggcactacatcgggaccacagatatttacaaagcaagcttgcgccacttcaggccacagcgcgacgtctctccgggtgggggacgtctaccttcaagaaggggtccagcaacaaagaaaatctcttaactcggctctgacccaccccaacctccctctgtacttcaacacacagctcccacccgctcaaggccccgtactccaaaacgcttacacagtaaccagcctaggattgagaaagcatccatgggctcaggcagacggccagccagctggtgggggggtgaacaactgtgttctgggacgccagccagttatggcatccggggaactctggggaggagaagggagaaccaaggtgcacaccttcgaagccctagagtccaaagggaacatcgtccatcgtgatggggtccagccgaagtgcccacgaacacagactgccctgcgcattggggttgggagcacatggccactggctaccgcccaagtgctgcggagtgagaggcgagaaggcatcctgggaacctcagggcacagcagcatggagcctggggcagcaccagctcacggaggccacctgccttctggtgggactcggccccacgcacgctgcttcacttctgaccaacagacacgcgcccaacagaaggtcacagcgcagactctactttctggccgtgaaggttctgggtccggttgggagagtcacctgctccttggcacctcagggtgggtccttctggcctgccggcttttctgagctagtcttggcacgtggcaaggacagccccgctcctggttttaagcacaggcattcatacagacggagtgccaatccgcacaggagcattgagtgctgagaaaatggactgagtgcaaaggcagcaaggcaacaaacactacagtaaccacctctcggttcacagtcctctcccaagggaccagaaacgcatcttccaccttgaatcctgggactcccaattgtcctgctagggtctcaaagcctctgcttccaagctctcagctgcctgcccacctcctggggaagaagcgcgcagtgctttgcctggtaacacccactgcacccctgccccgcggcagcctgcggtccctaactgctctccgagggcctcaagagttcctgacagcaggcatgtcaattacgggaggagggagggtgagacgccaaaatcaggttgaagaggtcccaccacacacgggcacacacacacaccacggacttttgatgagaaatctcctctccaaagcggacaataaaacactgcaaaacaaacacagcacacacccttgagatccacctgcaccttctccctgcccgactccacctcatacactaactccaagccagcctgtctcagaattccttagtcaacattttttttgtaagactgcaaaaacagacaagaaacaataaaaagacagattttctttacacagatttaagccaataatttttagcaaaatgatacaaaactgtcttaaccaagtagaagattggtagttacagtggaatcgtcagggagtacagggcggccaccactggagggagctgaggccctggaaaaggagtctgattctctgcaattctctctctgcttttcttcccagccccgttacaaccgagttcacgtggggggccgcagtgcagccccagcggtggcagctcttggagtctgtccgtttagtatgtttcccccacgagcgtcgctgggtgagtggcctggagagctcccggtgttaacatttcgatcctagaccgggggacgtgtcactagtaaagccattggtaacagagtagatcagccatgcattgtctgcccttcacagcaataaggagagttctcatcggtgcacgacagactgaagaccactggaagccacccgaccaggaatctgtcggagccaaagcacaggagaaggtcagcatggggctgggggagccggccaggcagataccacagtgacggtgctgggcagggaggggacgcaccgccaccgcctagccccagtctagacgcctgcgtcccccgccacgcacaggggcctctgtggctgggacacgtgctcagcagaacgagtgacaggaagacgggaaggaggaagaggcatgcaagcaaggtgcccgcggagccgggctcggcagggtcgaaggatccgagtggagcggagacgggtgctcctgcctcccttcctggaaaggaacctggtgtttgaaaatgggtacccctctcagggaagacatgaaaagcagttcctgtcaacacatttccagagtgtgcacagtgtgaaaactgcagcgggtctcccagcggcacagacccgacagaagcgcaagcccctgctggaaggagccgccgagcgcgcgtggccgccgaggagggagcacagcgtggacgccggccatgcaccgacggcggggagtgagtgggctgcggctggaggagttaatacagacgaagctgcgtggacaagacggctgggcagagaccaagtgtgaaaagaaacacaaaacaaggacagagataaatgagacaggaagagagaggcgactagaaaagctggcatggcagagactgcccagagtgtggcgcagcaagagcttaggagcccccaacaccaagcgtggagccacccagctgagcaggacacagacgcccctccaggcacggccgaccgcagacaaggcaactcaagtgctcggggcacccgccttgccactcctgcctcacgggtgggcacccaggacaggaggagagcaacggcacacggaacgcagtcacggggaggccacaggccaacaggatggtctcctggggtcactctgttccaaagctctctgtggacagcctccccccaagactgggcagcggactgccgccgctctgcaccccacaagaagaacagagcagaagaagcctcactctacctccagcacctggcatgcaagcccagcccacctgcaagctcccatgggtggggcatggtggctcccacccacctggcgctgctgcctggcgcccgccacgcgcacactcacccagtgctgccttccgatgggagacgagcagctacttgccgtggtgttcgaaaggaatgctattctgaggtggggaaaagacagctgttggtaagcgtcccgctggccccctgactacctgtgtcggctccatgtccagatgggcatccttgcctcaaccaggtccacagaccgacaggtgccacctgggggagcccaggcacagagcacagcctcacttgcctctcaggacgggcctctggatgagagtggtgcccactcctcttctggaatcacttgctcttaaggccaacaatggcatgggacaggccctcctgagtcttctcaagcactaagaaaacctgatcccagcaggatggcaggtgctgggcagccccacaactgggtctcagggcacagcctgaaggcaggggagacgcacatcctcgccggtacgacgacagggctcaggcctagtcctgggcaggagttgatcaaagcgagtcatcgactgttggaatgacaaggccttcttctcaccaagtaaaaaccccaaacagactcagcaactagatggcctttagggcccaggctactgtagccaaagagccctggccgaacaccaacagcccgaaaagagagggggcgaagagggaacagacccaggcggagtccgggctggggcggggccctacaactatgggggcctctgtgacctacaggcaggctgccacgtggtcttccacccatccacacccagccacggccagcaagccctgggagaccttcctgctgcctcctcccatctccacagggcgcaaggtctcctgagaggagcagaaagaacagggaagagcgacggcccgaggaggaagactggccggggatgagtcactgcccacggtgactgtgtctccagctcacccgagcaaacaggtgaggcgctcagagcaattgagcctcctgtattcccccttgggattcaaaacgggagctgctgctcacagccaccacgtgtgctggtgctggcagagtctggcaggaaggacacacggccaaagccttcctgtgagatggtgacaaaggagggggcccgccctggaggtggggagccctcaacatgcctctcaggaaggccccccagggtgtccaggagcagaggccaagaggcttcttttggagagaacacacccccaaaccagctctctctggagactcctccctgctgttagagcccacgttgtatttcctcatatggaaaacgagggcctaagagccagctgcgggttcctgccacagctcaccatggaaggagacactgctcacggccaccttgggggctggtggctacaacagccacacccaggtgccgccaaggccgtgtaccgagaaaaggcagctggactcagggctgtggctactcagcacgctcaggacaccttcactgcccacaaagatcccaaaccactggacactttactttctttaaaagaaacaaaaagcactcaggccccttccctagtctttgtcagccaagcgctggggcgaggctgtccaagtccggtcagcacccagcatggggagcactctgggctcctgtaccatggttcaggggctacagagccagccgcacatcaagacacgagggcacgggcagaccctcccgggaactgctcacaggaactgatgcgcaagtgccaggctcgtggaaagaagccagttaaaccctttctgtgctgtgtctggaggtgacagcagggttgtgtgcacgtaagggacccattctcgtgacgcagcccagacccctcgagcccaattcatataaccacaaagtcaaaataaccacgaagccaaaatccctgcatctttggtctctttgggaagaagttatacaaaaaggtctgtttctagtgaaattattagtgaattagaaacgtgcagtaaaaccccaatcattaaaagacggcaagtggtcaagagtgctccccactccggcatgttcctggctagccagctacacccagccccgctcacggcagcaggcctggctccatcctgtgatcccaacaaacacctccccacaagcccagagccaggctccagggcatttctgaactgagttcctgctcatccggaagacccgtgggggatctgggcaccccccaggatgcctgctggtgaaacagccctgccccactaaccctgcccctgttggcgaacaacccagaaaactatttgaagaaatataatggatccatatggagaaagctgttctagttcaaagagcacgttagcaaacgcaaaagacaacaaaagccagagcgaggagaggagagaccgctgcaggatgctgaagaggcggtggccgtggctaggcctgggctgcgcaacagggtacttctcgtccaagggaagacaggtgaggccgtcaaaagaaggaaagcctcgttgcagggcatgccaccagggagggtctcacaagaagcccgtggaggtccctacgggcctccatccctggccagtggcaagaatgaggaagaatgaggaaggctccctcgggctgggggcacccacaatggggcgcaagcaggcgagcggtgtcagctgcctggggacggctgcgggcagcggggcactcaaacagcaggagaaagcccccacggtttgctggcctcagggacctgagacctgagactggccacctgcaaccaggagacaagccccatgacggcccagcatgtctcccaggccctcccgagaagcctcatctgcaaccaagacgccacaccctggcgagattaaaaactctcaaaaatggggggaagaaaggaaagaagaagccctggagaaaccacagcccgctcttgactcggacggggtagcccgaggcccagcgcccgcccgggagctctgcacctacctgtgaggtggacatgcgagaggtatcttgtcggcctgtgaggtcggacgaggagatgttgacgggggccccgcggtgcagccgcatactcactttccgctctctctccatgccggagacgggccggggggaggtgttagctgaggacagggagagaaacggagtgggccgcccccgtctgctgcctctcactcggggctttctatgagaggctgtggccagagaggaccctgggctgcctggacagtcaggacctggctgtggccgatggccaccaacactcagatccggccggagggacacaaagggacatgggagcgaggtcaaggggctcacaggggaggaacgtgagatgcgggaggaatcacgcacaccagcaggtgccggcatttctaaaggcgcctgggcagcctggctcatccaccctcaggagcgagcatcgcctgacacagggcacttagtgtccaccaccaagtaccctgttgtccccaccaaccccaagacacaagaagtcaccccagagccagccccagagcgctgggaggggggcactcacccgtgtgtgaggtaggggtgaggggtgtggggggagccacttcctgcgtcccccgcaggcggccggaggctgtggaagggaggccgcgggtagccgggttccgcgagtgtctcagccgctcctctcggtccctgcgctcccgctcggcgtcatcggcggcccggctggcaccctgaggaggcaggaggtgaggccggaatggaaccagctttggcagaaagcaaccctaggtcctaggctgccccggccacgtgagaaaatacctaccaaagggcactgggacgagactgcctgcaaagccccccacaggctgcacgtttctcctcatgggatgacagcatcatccccacaaggggtcagagccaggcctctcagctcccccaacaatcgaaaaaaccccactcgccatggcatctccctgtgggctcagaacttccttaaacttccaaatgggcagcagctaccccctgctgctctgtgaacatgctcactaacacgtgcagaaagaggagagggacaggaaccatcggaggccaaagacaggccccaaatggtgacagctggggaggaaagcggggtggggatgagagcgtttggtcggacgaggagtacactcagggtccggaccctgcagcctccaacagcctgtgcaggtgtggtggcgtggccagcagccggcagccggatctgtgctgcactatccagatgcacgggggtggggaggtcagattttaagccgagacagcaacctatgaaaaagcagattctaactgccaatgctgtgcggcaggggcctgcaaactacagccccggggccaaacccaggtgccacttcttcctgcaagtacagctcattggacacagccacgttcaccaggcaacacacagaccgacacacctgcggctgcagcaccgtgcggccagcaccgcccagactcctcatgctgccatttacggaaaacgctggcctagcctgctctgagggccgggtgactctaatgccgcaggagggtcgctctgattcctcccgaggcagcacagccccggcagagggactgatctgccctgccgagtgcacccctcccggcacctgggccccgaggctcgggcctgcctcgcctgccatctctccggggcctccaagtactccccacgctgatgggcacttggcaagtaagtcaagatgaacagagtgcacccctcccagcatctggagaccccgcccctccctggcccctgcacgactactggacaaggctgccgtttttgtaccctcccaagaggcagttctgctcctccatcagactgctgcctggaaaagctccaaattctatttaaaactgacaacaaaacagtaagtttttaatgaaggaacacaacagttccacaggagcttcatttctgacagcggtgtctgaaaagtaattcagctcagacatggacccagggctgggctgcctgttttagaggctccactgcatactcacaccgcatcaagaaagccacagggaaaatcagctcatgacagggtcagtcaggctagacgggtagcacctcaccaggccccaaccccactcatctcgtgggcaccacgaccatgtggcacagcgaatgggaatgcgcacccccagcccccaccctctgcccccagggcatgctctgggccctagctccgcttggtgacagggagggaaggggcctcctgctgtccacacccaggaattccatggacccctctgcgttccctaatggcgtcttacttcttggcacccctttctggcaggcagacacccactcagtccaggtcctgcccactacacacttgcccttcacaaccagagacactccctatatggtacagcccctcaacaagacggccgccggcctctcactgacaagccatcccccgcacaccacactcagcgaacgtgctggcagtgcgacttacaaatttgagcatgttccagtcgaacacgtagtcataggagaagccctggcgatggaacagattccggaaaagctgccgcaggtacgagtagtcaggcttgtcgtcaaaacgcaaggaacggcagaaattcaggtatgtggcaaattcggctacaaaacaagaaactcaaagctaactcatgaaacccaactgcgactcaaggtgtctctgccaacgtcgctgtctacctcctgctgctgcacactcaaggggagaaggacagatgcaaaacacctgtcagatttctaagacctgaagccttgagaaagcatcgaaaagtattcaagtcacggccgggtgcggcggctcacgcctgtcaccccagcactctaggaggctgaggagggcggatcacgaggtcaggagatcaagaccatcctggctaacacagtgaaaccccatctctactgaaaaaaaaaaaaaaaaagttctagagcgtggtggcgggcgcctgtagtcccagctaccggggaggctgacgcaggagaatggtatgaacccgggaggcggagcttgcagtgagccgagatcacgccactgcactctagccttggcgacagagtgagactgtgtcttaaaaaaaaaaaagaagtcataaagcacaatttagtttcatttgaggtgtgtatcctggggcaatcctacaaatgcaaaggaaatctcccgagctcctggagggggccagagagggcagccactgcagagagaggccccaccactgcctgtccatccctttccagccacttggggccctgaggctcgggcctgccttgcctgccatctctccagggcctccaagtactccccacgctgatgggcacttggcaagtaagtcaagatgaacaggagggcaggctgttacctccatacacaaaagcgccccgctttcctgccaccacccctttggaaggtgagcaactcttctgacaaaacccagactgagccgtctcggcacacccgacacatatgcaacccctgtgagcagctccgctgagaagaggcctccagagacttacaagggtagcctttacacaacacttcgatgggggtggacattttcttctcgctaatcctttcgtatttctgtctcttggtggcagccttcagcccctgccaggggagagagcccaggttgaagtacattagcacgtagcccagagactccaagtcatctcttcgggattgttctgaaaagaaaagggaaaggcgtgaagaacggcacttgcgtgctcacgtcaaagcaaaagacccggctggccgttccagtggagactagcctcagacacacatgcccagatcactccagctggcacttccagtggagacgaacctcggacacacatgcccagatcactctcacccagagctgcccctcatgcatactaaggaaattcccaaacacatcacaggtgactcagaaatgtcccagcatccgcctgcccccatacacctggcagtcacgagccagcctgtctgccgcaaaggtctgatgacacgcttgcagccccagctccccgagaggctggcctctccctgggctgaggcatggacgcgcccaaaggcaccccaggtcagtgaccccatgcccaggggctcaccaattccaaggtgcgtgttgatggaggcgtaccgcgccgtccccgtgaggttcttgttctcacgataggggatgtgctggtgggtgcgtgcatcccggtacttcttggccagcccgaagtcgatgatgtacaccaggttgcccttcttccccaggcccatgaggaagttgtctggcttcacatcccggtggatgaagttctttgaatgaatgtattcgatgcgactgatctgtgagcagagcaagggcgcgagatggcaccccagggcagtctcagggagggaccgctcaactgtgggacactacatcagtggctgcattgttcctgcccctcagccacagcagggtagtttaacaattagcgagggggatgccgaactgaccaaattgttcccccaggtgcctgcagcaaccctccacactccaccctccacaggcctaggcgctttgccttcagctcccacaaaacagagaggtgaggcgacagagaggggacaacccgccactagacatcggtctctcccagcactgttctctgcacagactacacaccaggattagcagagaaactgcacggaggtgcttaggaatcacgtgtgttcctgagagactgaggaacccactgaatggaaacgtgctatgctggtaccgagaaggtggcctccaagccagtgagctgagccaccagagcctcgagaagccagtgagctgagccaccgaagcctccagaagcctcgagaagccagtgaactgagccgccggagcctcgagaagccagtgagctgagccgccggagcctcgagaagccagtgagctgagccgccggagcctcgagaagccagtcagctgagccgccggagcctcgtgaagccagtgagctgagccgccggagcctcgagaagccagtgagctgagccgccggagcctcgagaagccagtgagctgagccgccggagcctccagaagccagtgagctgagccgccggagcctcgagaagccagtcagctgagccgccggagcctcgagaagccagtcagctgagccgccggagcctcgtgaagccagtgagctgagccgccggagcctcgagacgccagtgagctgagccgtcggagcctcgagaagccagtgagctgagccgccggagcctcgagaagccagtgagctgagccgccggagccttgtgaagccagtgagctgagccgccggagcctcgagaagccagtgcagtgcgctgagccgccggagcctcgagaagccagtgcagtgcgctgagccgccggagcctcgagaagccagtcagctgagccgccggggcctcgagaagccagtgcgctgagccgccggggcctcgagaagccagtcagctgagccgccggggcctcgagaagccagtcagctgagccgccggagcctcgagaagccagtcagctgagccgccggagcctggagaagccagtgcgctgagccgccggagcctcgagaagccagtgagctgagccgccggagcctccagaagccagtcagctgagccgccggagcctcgagacgccagtgagctgagccgccggagcctcgagaagccagtgagctgagccgccggagcctcgagaagccagtgagctgagccgccggagcctccagaagccagtcagctgagccgccggagcctcgagacgccagtgagctgagccgccggagcctcgagaagccagtgagctgagccgccggagcctcgagaagccagtgcggtgagccaccggagcctcgagaagccagtcagctgagccgccggggcctcgagaagccagtcagctgagccgccggggcctcgagaagccagtgtgctgagccgccgggggcctcgagaagccagtcagctgagccgccggggcctccagaagccagtgagctgagccatcggagcctcgacaagccagtgagctgagccgccggagcctccagaagccagtcagctgagccgccggagcctcgagaagccagtgagctgagccgtcggagcctcgagaagccagtgagctgagccgccggagcctcgagaagccagtgagctgggccgccggagcctcgagaagccagtgagctgagccgtcggagcctccagaagccagtgagctgggccgccggagcctcgagaagccagtgagctgggccgccggagcctcgagaagccagtgagctgggccgccggagcctcgagaagccagtgagcggagccaccggagcctcgagaagccagtgagctgagccactgcagcctcaaggctgaggctcagcaaatttccatttcctctgtgaattaatggccataataatggcaagaacagcacaagcgagtggctgattctatcagacagcaagtgtgtgccaactgtcaggaaacagtccttaccatttggtcagcaagcagcaggacggttttgaggctgaatttcctggagcagaagttgaagaggtcctccaggcttggccccagcagctccatcaccatgacgttgtagtccccctctgccccgcaccatctgatggtggggatgcccactaggcaaggaaatcagacacagtgtttcagtccaggccctgcctcagctccacactaagtctgcactgtgcacaccaaggggtcatggtgacaatcctgaacgggggaggggtggtggaggtagaagaccccggcaacgccgctcctcagggacccatcctcgagattaggccccatctattagcaaatggcctgaggcagacgttggatgagggccaagcagacaggagctgtaagggggacaaggaggggatcgaagccccacctccccgactcccgtcttctagggcaggggggcaggagacacagaaagcagccacgatgtgggaaagaaaagagctcaggcataaaggagcagcagagcccgccagaaacgtcacacaggagatgggaggagagaaagcagctaccgtgggttaggtgagagaagaaaatatgttcaattactccgatgttggtagaagtatttgactggataagagaaaagcaaaagcaatgaaaactttttggggatttacacagtaacccaggattgaaatatacaaatcagggaagtgaaaataaagacacaataaatccaacaggaagaatttaaagatggctgcatagtatcagtgctgaaggcataatcaacactataaaggcacacgggccaggtgcagtggctcatgcctgtaatcctagcactttgggaggctgaaacgggaggactgcttgagctcagaagttcgagaccagcctggataacaaagggagacccttgtctctacaaaaaattctggaaattaggtgggtgtggtggcacgcttctgtggtcccagctacttgggaggctgaggcaagaggatcacttgagcccaggaaatggaggctgcagtgagccgtgatggcaccactgtgctccagcctgggccacagagcaagaccctgtcaaaaaaaaaaaaaaaaatccattttagaaaaaatgggtgaaagacctggacacttcacccaagacgttacgtatgaaaagtcaacgaccacaagaagattctcagagagatggaaaacacatgctggtaaaaacatgcacaggaatgtgcaccgcagcctcacgccacagtcaaattcaaatgctgcagcaacaggtgggtttctcaaaatgccacccccaaaatacgtcctttggtcctatttttttttctcatatccacaagaacatgtctcttcggtatgttttcacagcactggatccgcaactatacacatggctctacacacatacggcttgtgaacggcctggataaaccttttatgtccttccatggcaagacagatttttagtttagtcttaaagcaagttttggtaccactagggaaattcaattcatttaaaaaattgtttcattattttattgttttgagacgaggtctcgctgtcacccaggctggagtgcagtggcaccatctcggctcacggcaacctccgcctcctggattcaagcaattctcctgcctcagcctcctgagtaggtaggactacaggtgggcgccaccatgcccagctcattttactggccacatgtatcgcctctcctctgaaggcatgtatttttttttttggctaagtttttctatcatggtatctttttcctattcatagtagttctttataacttctagatactaaaccactgcaggttttttgtgaggcaagtatctctcagttaatggcatgttttttattttcttctggagtttcttgatgaaaagacttttcatgaatatgaatgccttaatcttttgctttatgagtgctttcagtatcttacattaaaaaaatagtttctgccctcagcgtcaaaaagagatgctattgtttttttttaaagtgttaaagttacttctacttctaacaaaaacagtaataggggcctgattcgccctcacaccttaagtaactaagggaaagaacaaaacacacaccctcacacatcacagggtggtttccacaacactgggcccggccaatgactgacagccgtgccagccagtgacagctgtgcctgagggcgggaaggagccgtgagagggcgccctgggctgccccctgcactgctgggagcataagcacaaacgccagactgaacagatccatggaacccaacctcatcccagaagagagctgaggaggagcctgcagaatgtggaagagcacagcatgcgtgacattctcaatgtccggcatccaaagtggaaaacaaacctggagtaagaggttaactgaacagacccggatgttcacatcagcagggaaagccatgaaacgttactacagatttcgactgtattccaccgtcgaaaagttttttaactggccaggctcaggcctataattccagcacgttggaggtggaagtgggaggatcacttaagtccaagtttgagaccagaaagaaaacatactgagacccccgtctctacaaaaaaattttaaaaattagctaggcatggtgctgtgtgtctacagtcccagctactcgggaggctaaggtgggaggatggcttaggcccaggaagtcgagactgcagtgagccgtgattgcaccactgcactccagcctgggtgacagaatgagaccgtctcaaaaaaaaaaaaaaaaaaagttaaaggcatgaggcatatacatatatatgtgtatttatgtttcggtcttttatatatatgtatatatttatataaaaaacataaatgtatatataaacctgaacatatgtgtatatatatatattatatatatgcaaatacacatctactttcagatttgggaatagttgcattctgcgtcacagtcgagcatccctaatctgaaaatccaaactgcccccattagcatctcctttgagcatcatgttagcactcataaagttcccgactttgggtgtttcagatactcaaccttattacggatttgtgaattcttttctctctctagatgcagcattacggattcccaaattccctttctccactccaatgagtcacagttccttcttcttaatactcattttggagttttcactgtcccaaatttaggcaacagatcacctttcaaactttttcccgtacctcataacaaatgcctgccatgtgttccagattcaccttctttctttctgccccagccctggaatcagctgcttctccaagcactcaggactcctcttaacagagaatgataaatacttagaaacccctgaggcccggtgtgctcagtgttctaggctgtcctccttctaagcccttctcgtggccagaaccacacaaagtatcatcacgacagctttatagtaagtgctggtgtttgcagggcaaatggccctcttcttcacaagtgttttaattaatcctggacttgcactcttctcagtgaattctagtcaccttgtcaggaaagagaagtggctggatgtcgatgggaacgtcattgaatgttaagagcaactttgggagacctgacacctggcatcttcctttctctgaacatagaggagaattaagcaaatcttccttaaatgtccttcaataaagtttatatattttctgcatgcagatcttatctgtcttaaaatttaccccagatacctttttgctactgtaagcattatgttttaaattacattttgtaaccaattaaattgttggtttaacaaaatgaattgattttatattttgatcttaaatttgctcaactctctaatctgttctgagatccctatttaggaaattacatcacatcacatgccagtaacagcagttttatttctgcctttttcaccctctgccctgctgaaaacagtgttgtgaggctgaggatgatgtgggttacacaaaacttggctgcactgcaggggggaatggaaatctacataaccaccttggaaaaatcgatatgtatcaatatgcagacgtctgcgttatcctgcagaactggacatttgcacgtaccaagcaacagccactgcaacttcacacgtaggtgctggcatgtgtgccccagacacatggacaagatgtgcacaaaagcactgtccctaacagcaaatgctagaagctccccagggctcaacgcagtatgagtcagacgaagctactgtatacagctatgtagatgatcaaacaatgaaaatcaattacctagagctgcaatcgatggggaagaatctcaggaatactctgggtcaaagaaaggtacagaatacagactgcatcgcgtaacactaaaactttcatgtattcaaaagactatgtggcatggactcctgatccatctgaactgatggtgtactgagtgatgtgactgatggtgtactgactgatggtgtactgactgatatgactgatggtgtactgactgatgtgactgatggtgtactgagtgatgtgactgatggtgtactgactgatggtgtactgactgatgtgactgatggtgtactgactgatgtgactgatggtgtactggtgtactgactgatatgactgatggtgtactgactgatgtgactgatggtgtactgagtgatgtgactgatggtgtactgactgatgtgactgatggtgtactgagtggtgactgatggtgtactgactgatgtgactgatggtgtactgagtgatgtgactgatggtataccgagtgatgtgactgatggtgtactgagtgatgcgactgatagtgtattgactgatggtgtactgagtgatgtgactgatggtgtactgactgatgtgactgatggtgtacggactgatgtgactgatggtgtactgactgatggtgtactgagtgatgtgactgatggtgtactgagtgatgtgactgatggtgtactgactgatggtgtactgagtgatgtgactgatggtgtactgactgatgtgactgatggtgtactgagtgatgtgactgatggtgtactgagtgatgtgactgatggtgtactgagtgatgggactgatggtgtactgactgatggtgtactgagtgacgtgactgatggtgtactgagtgacgtgactgatggtgtactgactgatgtgactgatggtgtactgactgatgtgactgatggtgtactgactgatgtgactgatggtgtactgactgacggtgtaccgactgatgtgactgatggtatactgactgatgtgactgatggtgtactgagtgatgagactgatggtctactgagtgatgtgactgatggtgtactgactgatggtgtaccgactgatgtgactgatgatgtatttactgacaccatctttctttaacaggggtcctgctgtcacccaggctggagggcagtggcaccatcacagctccctgcagccttaacctcccgaactctagccatcctcctgcctcagcctccagagtagctgagactacagatgtaagccactgcacctggcctgtttctttttcctccctaccccccaaatgtctcagcagaaatcaccccttttgttagctgtaagtaacaatgtaccccgtcatccatggcattagagaatgaataaaatacagtaaaagcaacatgctcttgcctctcaatgcacttgtgctctatggacttactgctactggtgattttgcaggaacaagtgaagccaatgggtttgaaaagagaaccaaggctgcctgcgcccaagtgtgctagtcatccagggccaccctgctgccctgcccaggtgctgtcacggtgggaagcggccactcatgctgctatttgtagtctcaacacttttccctcatggtgcccgaaggtagctaaacatatgcgtggggataaaaatcgggtggacaaggccagatacatgaagacatgctccactctcatctgtgaaaagtttcaatataaatgtggggactgagcattaatgcaaatagaaattttcatgaagttttcagcagttgaaccctaaaatgatttatataactaaaatgtttctagataatttcattatttggattttgaaaaaagtttcttgtaggatgacaaagcaacaaaaacttacaaacaggtgagcaaggtcctggcacagacatggggctgggcgggcgaatgggctccacagggagtgttccctctcaggtgggcagggcagggtcctggttgttgattttaatgtcctcgataccgtacatgttacatacattctttggtgttgtacaatatttcacaagaaaaagatgatggaagacagtcgcccaccctcagccacagaaccgtcacccactggcccgggttctacacacgtactcccctcttccctccctcaaaccatgcctaccatctcagccttgacgaaaagcagctgtgaactaagtaaatgtcctttgctgaggggttccccaaggagggagtgagctaaggctgcttttgggggatgttaggattggaaagagcagttacaactgtccccaggttttgcccaccagtccagtaggttttcataaaaactaggtgtctatccaaatcttccaccaacatagctacttttagtttctttctactatttcaggtattgaatctattgtcccaaccagatttgggacaggtgggagcatctggggcacattcctgacagctgaaggccacgtagggtggccgccatttccttctctgggagcagacagctgcttcagcagtagcctggggggctagaatgcccaagttcaagtctgtcctctgtgaagttacacagccttctaaacccagtttcctcatttgcaacataaggctgaagagctcagtacccactgcccagggctgctatgggcagtgaccagtgtgtttttaaggctcattcttcccaagctgcagagaacagaatgcactcgctgtggagctttctcctggaaggcagcatccatcaagcaaacgtaaagatcagaacctggcaccaccacttgactttcacgtgaaaggaaggaaaaccgcaatgagtggtgcttgctgccctttttttcagagatagcaggacaatctggaccacccacagcaaacactgcacaaggggacaatctgtaccacccataacaggacaatctgcacaaggggacaatctgcatcatccatagcagacactgcacaagaatggcagtggcaagatctggtggcttctggatgaaacaatttcttcccattatttgtcaactccccggtttagtctcaaagtgaattcaagaaccaccaccagaattaggccttttgccttctcggacatcatttgttttctaaaatgcagatctttagatctttacagtatctgacgggcgcgatggctcacgcctataatcccagcactttgggaggccaaggtgggcagatcgcctgagatcaggagttcaaaaccagcctggccaacgtggtgaagccctatctctactaaaaatacaaaaattagccaggcagggtggctcatgcctgtaatcccagctactccagaggctgaggcaggagaatggcctgaacccaggaggcggaggttgcagtgggccaagattgcgccattgcactccatcctgggcaacggagtgagactctgtctccaaacaaaaacaaaaaacaaaaaacaaaaacaaaaaccaaaaccttgacagtatccaccaggtgtctgtgcatttaacacagaagacctgacctacattttggaatggtcagggacatggcaatgcgctcgaagcccaaatgggagaaaaaccatttctgaaatcctatttggtttccaggatcctagagaaggtgccatgggcaggaacatgaaggtgcaggcttctttactctcttaagccagcggccacaggggaagcaactttgcctgccaggggccttcagcactgtctgaagaaagttttgagtatcacaactaggggcaggggtgctgccaacatctaccatgcagagaacgcaccactacaaatggcactagtgccgagtggagaagtcctgtccggaaccacgtagcactttttggttcagggttggcttccccagtgaccatcccgggcttctaaggactggctttcttccctttgcccttgtgtacccctggcttgcaagttctcctggagacatctctcgtaaaaacttaaggtgtttttaagcttgcaggttttacttgaccccagcaccaggctcccgcaggccaaggccacaccccgcaccaccctgctctattggctcgtcacaccttcaaggcaatgcaggctccaggcccttgagaagccagtccaccaccaagggccgccagacaggctcccagggcggagtctctgctgagctttccctgggttggtgatgggatttttcattcctgtggcctcctctggtcacgtgaggcccgtgatgggacacactgggtgcccctctctgtaacgggttccccaggaccacaggtgctgccaaagatattttgtgtcacataaacttagaaacgtcggtttcttgtagtagcacagattacgtgcttgtgctgagaaaagatgtcaaagaatcaaatcaacagtcctccctttcccgtgacaaaagggctaacagaggccctgaacaggttttcctttggccagttgcccaaggggactcacccaaccatccacctacaaatgtgccgcggagccttctcactgggagggctccacagacgtggcacagccactcttcagacaaaaagctctgttcccaaagagggctcctgccagaccgaagctctgctgttgagacacacgcttcatggctctgaaatccccgcagagaataccctcctgctccatcagcccaactgtttgaaagtccagggaactcgcaagagctggactctgaggggaggacaggagcgctctgctccacacctggcccaccgtggaacaccaggtacctaaggccctgggctgagggctcgcagaactgggacagtaactgagctggaagaggtcatgatggtcgccaagttcaaaacccttgttttgctcggagaaaacgagcccagagagtatgaagggacttcccccaagctataagcaaagcatgcgaaggagcagaggcctcactcagggatcacacatcaggaaggccccactgagcaacacacgtgccactggcaacagctccagtgaccactgaggggcacacgacaccacggggagcatgcattgaaattcacacaaaatcttttttttttttttttttgagacggagtctcgctctttcatccaggctggactgcagtggcgctatctgggctcactgcaagctctgcctcccgggttcacgccattctcctgcctcagcctcccaagtagctgggactacaggcgcccgccaccacgaacggctaactttttttgtatttttagtagagacggggtttcactgtgttagccaggatggtctcgagctcctgacctcgtgatccgcctgcctcggcctcccaaagtgctgggattacaggtgtgagccactgcgtctggcctattcacacacactcttgatttcagaaaccatgacccaatatgaagcaaaatttaaacaaaaggacaagatggtataagattttttttttttttgggggggacagggtctcactctgtcgcccaggctggagtgcagtggcgtgatctcggctcaccgcaacctctgcctcccagactcaggcgattctcctgcctcagcctcccaaacagctgggattacaggtgcacgccatcacacttggctaatttttgtatttttagtagagacggggtttcactacgttggccaggctagtctcaaactactgacctcaaatgatccacccatcttggcctcccaaagtgctgggattccaggcgtgagccaccatgcccggcccataagatgtttctttgtgttgagggagggtctctggacccaagactctctgaaggaagctgtgactgctttgtcagggtgtggagaacacttccctcccttttgcccagaaccagttttgggtttattttaaccagcaatgctgagttgctgttctcccttgtcaaacagaaccctggtgttgctctgtgactggtaaagacctacctcctccctgcatcatcttgtagattttgctctcaatgtggagctgagggtgtttggttttgacacattcaagcttgatggcaacctcttctcctgcagcaatgtccgtaccttggcaaagaaagaaaaccacaacaggaattacctggtatccaccaaataacccaacatgctggagaaacaacaagcactatgtgttttccatgaaggaccaagtgagggatgtgttctccttcctagcatagtaaggcgggctaatcggctgacacatctctgggggaagttatccatattcccattttcacaacaggacgaatttgaactgcacagaaagtttatgtggcttccatcacccgcccaccagtcttcaggtgctgcagctccctctccacagtggcccttctggtctgcatcctcccatcagccctgcccaaggcccctgcacttgcccgccccagacagcctgtggtagagctccacggtgccattcccttttctccatgctgcctgataggcctccgagggggtggtttgagtttccccctgaggaagggctaggtttttacccaatagccacagtcccagtccacccaggcctggcatcacaggcagcgggagtcatctctagccaacctattgcaggcaaacaccctccaccaggcggagggaggcccttctcccttcctggggacacaaagccagaagaatcgcctgttttcaacgccctaaatgtaccacctaccaacacgcaccggtcacacatctttcatcagtctatggctaaaaccaatgacacatctaataccatgacgatcggactatgagtttggaggcaaaattacactttttatctagaaatgttccatctctgctttactccaataaatgacaaatgtgacaaccaccatccctctcaggttcacccacaaatgctcctgagtttgaatctggcccaaagccttccccaaatccactgcatgaggcatccaaggagctttaaccgaacaggagagaaaaagaagctgcacacagtacatacccagctctctcctcttccctcacgagtcccttcagagtataagacactggaatcggccgggcgcggtggctcacgcctgtaatcccagcactttgggaggccaaggcgggcggatcacaaggtcaggagattgagaccatcctggctaacacggtgaaaccccatctctactaaaaatacaaaaaattagctgggcatggtggtgggtacctgtggtcccagctacttgggagcctgaggcaggagaatggcgtgaacctgggaggcggagcttgcagtgagccgagatcgcgccactgcactccagcctgggtgacagagcgagacaccgtctcaaaaaaaaaaaaaaaaaaaaaaggacactggatccttcccaacagcgtggctatgtggaaaagaattcacactagcttcagcagcccagacaaagccctgggagacttccttccctgagagactgtggtgctgggcaaagcaacttggctagttcttagtgactcggtttctcttgtcaatggagatcagtggtgaggtctgacgtctgtttcatgagagttgtggagatgaatgggttaacagtttcttttactgctctttaagataaggttccctgatgaaaagcagagtaaggtcaagtgagcactagagcagtctgctgatatccacacgtccactgaacacccaggaagcccctcgtctgcccagatggcggcatgagatgtgccacttccagcctgggccccaaaccccttgccactgctgcgttccacaggaatcgccaccaccgggtcaccgccagtgaccattctagatttaagaacgtcacttactatcaacagagactcttcagagtactcgaggtaacaaattttgttcttcctgcctacagttgggacagtctatccaattacaagagaaatgacttcatcgaaaaatgtactgtgtaaatgaaaaaccactctgagttcctctaaggacctggactctgaactcaactcgccagccgggagggagggtgactcatcccactagttatgtcagcagctccctgcacccccaagcaggcgcagtgcagcctcggacagtaccgccaccctcgccagctggcagcccagtgaccccatggcctggggccgatggcttggggccacacagtctgctgactagcatctctcactccacttctctgtagctgataaagctaatgtctgccagtcacacctgcagcactgactgtcgtggggcaaaagtcatcaccagccgctctggcacacaacacgaatcacaccctatcatggggccgggacctctcgctgtgcaagcacacagatgtgcaagcacacagagccagccctcctgtggaaccgacaccaaggtcgccccgagtctctacaggggagtagctggatgcaggtcctgtacacagatgtgaggatggcaactctctggggcctgcagcagggacctcgtcacctgctgggcagaagcatcaagaagcagaacaccaaggtctgtgcattccaaaggcaccacctgcctcaaggtcgctgagcactgctcagaccccctggcctgcagccctgtcccacctcgcccaccgggggcacccccacactctaccagccatgctgctgaaagtcagatcctcaagctgccatcagtgcacaaggcagcacagaggcgctcagtaactgtggctgcaatctggcatcgctgcagcattttgaccttatacacaagttttggcatgcaacaggttgaaaattacaagcctggttcttcaccacaggttaaatccgagaagcactactagaaggggaatgagaatttgaaagaccctgagccctgggtgtcagattcaaaacaaaccaaaacctggtgacacgcagatcaccaggttgtctgggttgtctgtttatacaaaagacattctgtcaacaaaacaaattcaactcttccctgcagctcaacaatcctggtctgctgtgagacagggctttcctcagtccgtgtttgggtatcagttaatgttagtcctacaaaaacaaaattacgtccctcaagttcagcagccaaaagcagatggtggccgggtgtggtggttcacgcctgtaatcccagcactttgggaggctgaggctgatggatcgcttgaggtcaggcattcgagaccagcctggcccacatggtgaaaccccgtccctactataaatacaaaaaaaattagccaggcatgctggtgtgcgcctctaaccccagctactcaggaggttgatgcggaagaactgcttgaacccagaaggcaggggttgcagtgagctgagatcgcgccactgcaccccagcctaggcaacagaatgatactttgtcttaaaaaaaaaaaaaaaaaaaaaaagcagatggtgagttaagcgaacctaaccagagtgtggccctgtcctggcacaggagggtaattctgaattaccagcctggatgctggcaactcccattaaggattgtcttgtcaacaaaaaaaacagggagacgccttgagcagcaggacaaaggtcaactcgcagggcagcggtcagcagtaccacgacttctcattacagatgcttgagttaaggagagtccaaggtcaacagaggctacagccctaacactgcagtgaggagaccccagaagctacaggaagaacaggtggtcgctctcctctcatggctggtcagcatcttggggccctattgcataccaggcaccctgcaggctgcctcttgagaaatcagtcagtgaggggaaaaacgtgtgcttcagagatgaagcagttagctcccaaaagatgcttgtgcacattatgaagtcagtccatccaggtaacaggtggacaaatggaggccctgacaagctgatggtgcgatgggatcaagtacagatgccaacagattcatctgtccagcccaccagccaggtaatccagtcctgccactaacctccagaacacactacaggtgagaacagaggcaggaccagctgggctctcactgcctctctgcatgggccgcctgcggggtgaacacagcaggcctctccctctagcctagcccagctgaacagtcctcttccgccagacacccctgtggttctggggctgggaactcatggtccacattaaggacactggctgttttcaaatgttaccaagtttatttccagtggtactctgccagcataagtgaaagaacttctggtttatggccacaccacatggacacggatgcggagggcggcacagggccggggccaggtcacacaacaggctgccaaggtgtgcgctccacaggtgtgtgtgggctgtgtcaccttcccaacctgccctcctgaagggccttgcggatctggcaatctcagactgaagacagattgttctttttggggtcccactttccaaagcctgggcattcaagaaatagccccaaaatactgccccctttgaaggggcaattttggaacacgacaacctggcagggccctgcagtgagcacccgccctccaactgtcacagcagggtcggggcaggcaggcccacaccacgcttctagcccacaggcactccactgaagcacagccttccccccttcctggtctcaaacatctgaaagcacagaaagtccccggtagaaaaacaagaacccaaaagccaagctcaaagcaaggtgaaccccacctggaggataccaaagtgacaacagtaggaatggtcttaacgatactcatactagaatatacacgacacacagaggtcaagatgaagacctagttcctcgatttatgtgtaactggctgcccaaacaaaactatggtggggatgaccgatccatctcatagtcttcagatcagccatctttgactctaactgccattctgctcagacccacgcttctttcaaactgccttactccggctaacgtgaccacctcgcctttcctccgtggggtcgtctgaaaggaccacagtgtaggctaggagccaatgctgatgggaaaaaaaaaaatcagctgtgcctaaccccactcaagtaactggacgtgtaccctgatgggtggctgtctgggacggctgtctgggggctccaaccccagggtgtcagagccacagccgcccgcaatcccgtatccagcatgactgtatgcccagcgcgaggtgaggcctggagggtagaatgctgagtgaggagacagccttccaccctccacctctggaattacttggtgacaaccacaccaaaatttgtcttaatctatctttggaaagcacaaagttgtttgacaaggtctcagatcagagaacagatagtttcaaagtacttcttatttatttattttttgagacagagtctcactccatcgcccaggctgcagtgcagtggtgtgatcttggctcactgcaacctccgcctcccaggttcaagcaattctcgtgcctcagcctcccaagtagctggaattacaggcagccaccaccacgcctggccaatttttgtatttttagtagagatggggtttcgccactttggccaggctggtctcctgacctcaagcgacccgcccacctcagcttcccaaagtgctgggattacaggcgtgagccaccacacccggcccaaaatactcctttttgatgcctgcctaaaggtggctaatggactggctttgcagtgtaactcagatcctggggttaaaactttcgccaaaatccattgttctataaataagccaaacgacttccattgaccaagcactctgacttcccaaacactgccaagaacacatccagctgaccacctggtataaatgtttaatagccaaacccaaatgtctaaagcctgcttactcagcagtccactaaggcatatgtacaggttcaaaagcaacaatatggcatgtgacagggtcacctggcaggttaaccaggcaccgaaagtatgagccacccatatgtgtggattcgtcctaacgctgtcagcccaccgggtcctgagtcctctctctggtgacaagtgggaagggtgtgagaactggagactgtccacatgtggcttcatctaaaaggtatgaccagaggcattactgacatcccaggggattcctgaccctagctgacaggtgccccagttaaaacacaccccaaagctagggctgctggaacagaaaacagctcccctcaaaggtctgcagcagcccctctgcaggcacaccgcctcaggctacatatcctcaaattcaggggatcttggaataactcgtgcattgcacaatcccactaacaagtgcggaaaattaagttactttaaaattacaaacttgggccaggcgcggtggcttcccagcacttcgggaggccgaactgggcggatcacttgaggtccggagttcgagaccagccttgaccaacatgaagaaaccccgtctctactaaaaatacgaaattagccaggcgtggtggcgcacgcctgtgatcccagcttttcgggaggctgaggcaggagaatcgcttgaacctgggaggcagaggttgcggtgagccgagatcacgccattgcactccaacctgggcaacaagagcgaaactccgtctcaggaaaaaaaaaaaaattacaaacttgaagatttaagccaacctttcatcacacttgtgttcacgtgcatatttttccattgtaaatatgacacaacccaaaaccttctaatcccattgtttttgaaatctaccttgagactgttacagtctaaaggacacctcatgagtacaactacctcatctgcctctcatcttgccagcatcttaatcctgtgtgactttctctacattcacctaaacttaacccttgctcatttgcactcagtcaccgctccaaggccaaggggaaccgttcagagagaacccccagcgggagggcaagccccactcctagccgggccactcccccgctccacacggcatttgggtctttctgacattttcccccacgaatgcaagacaccggggcagcctctgagggggcagccagacagccccggaccgggctgcggaagaaagagcgtggcctttgtttactgcggtgaccttaggcgtagaggaagccgacgcccgcttcgcggccccagccctaccccctcccctcccacggcccgctgcccccacccccgccctgcccctcccccaggcccgcctccccacgccccacccagcccttcccgagtccgctccccacgaccctgcccctacccaggtcggctccccagagaccatgccccaccccgggtcagctcccctatcccctccttccccaaccctcccctctccagaccctgctcccccgacctggtcctgcccctcccccacgtccgctccccactgccctccccacccctggccgcgctagcctagtggccgttgggttctggccacgatccggcggtgccgggacttgcgcggagaccccgcgggggccaccacttccttccgcgatcgcgcttggtcttggcagccgcagggcccgggtcttcgggcggcgggcgggggcggcggggcctcaccgagatagatgtctccgaaggagccgctgccgatcttccggcccagccggtacctgttcccgactctcagctccatggcggcggcggcccgattcgctcctgccctcccggccgcttcctgggtctgaactctgggaggcggcgccgctgctgccgctactgcgggtccggctcccggctccgcccccctcacggccccgctttcaccatcgctttcctgtcgccccgccgctcccagcgcctcaatacggggcggatgggacagtccgagcgccgccgccgctgctccggcccctaccggtcccgcttgccctctccccgccgcggatggactcggatcttccgggcctaaatcccctttcagctgcctaaaggagccgccgccatcgcgctgtgacgtcacttcccctagcaacccggcggggcggggccgcggcgctccaggggcggggccgggcggggcgagcgctccaggcctcctcccgaccctgcgccgtgcccagcccctctgccctcctgttaccccgggacctcgggccgccagccccttccacgtgcaggctcctgctgctctcgcgggggcttttcgtgtgtcccccgagatgtcgaggaagccaggtgagttcctcgcgacaggcggtgccctttgcaggaggggacaggtagctgaggcgtggacagagtgacaggccaggctcaggggacacaggtgagaccccctcactgggctgccagttcccgggcttggggcatcccagtacgtcagcgtctgcggccttacctcctgacacctaaggccagagacagagcaggcccgcgccctgggaggtcctgatgtccagcctgaagattgaggacaaagccaccacctttcacaaaatgaggccagaccacctgcctccctccagtccctgcggcctggagacggagtcaacattcttatctgtgttggatctgaatgttcctccttgcaaaggaaacaaggagtggacgttcaggctgatggccagcttcaaagatcggggcctttgattcccatcactgggaagaaagcccttcagacaagcccccccaggctgcaggtgcatggggaccttgaagaacccgtccccatggtcccacgtccatgtgtctcgagacctgtcgcatcctcgctgaaactcaagaatgtgaaacaggtgaaggtgtgttttgacgcattagcataccagggctgtggtgtgggcaccgccgtgtgagtgagacagcagcctcagcccgtccaggtcactgcagaagaggaaagcagcccccacaggccccacagtggtgctcgcctttctccaccccccagtctttcctctccacccctcagctccaaacagctggaggtcaggtcggggagacgggcgtccattcccgaaattacatagcagggcctggagacaggagatgccgccggccagaccaccatcagtcactaatgagggatgggcagtcggaactgcccagtttctgagttacagaagccgggggtggggggctgccagactagtaaaactgaccttgttggcggaatcgctcacggcttttctgttgatgaacagagtccagctctcccacgggtggctgtgatccttcttcctggggagtcctgctgtccctgactaggggcacctgcccacctgtcagctgctcctccctcggctggtcctcctgggctctgatggccccaacatttctagctcttctcacccatagtgccccaagcttcatgcagctgcggcaggtactgtgcccgtctgcctggcttttgtgtgtttgtgtcttgactctataacccgtgcacacggactgggctgtggtgtagtggggatggcaggagccctgggaacatgcgggctgggcaaggtgaggcaggctgattgctgtggctcccccaccaccagccccagccacaacaaactgacaaaggaagaggacagtggtaccctggagccctggggtcagagagaggaggacaaagcaggtgtgtagcccagggaatgacagcaccccttccgagaagacagggagggtgcagacatggccaggttctgagctagaaaactgtcagcagggggctgaagctgaggatagtcattgccaaggaacagcctccgtcacagaggagacgcacagatgcggtgacgagggagggatgcggggctggtgaccgctgggaacggatgtgtgaggcagagtctccaggcatggtctgtggggcggtttgatgatactagaacatctcagagtagaaggacgtcccgacctgcagactggaaagcccccagagctcccggcaggacgtatgagggccagcccacacccaggtctgtcctgatacaactgaacgccacagtgtcttagctcctttactgttgctatcaagaaacacctgaggctgggaaatttatgaagaatcatgaggtaatttgtatatttgtccacactaaacctcatgttgaattgtaaaccccaaggctggaggtggctgggtcatgggggtggatttctcaggaatgtttagtaccatccccttggtgctgtccttgagatagtgagttctcctgagatctggttatttaaaaagtgtggggcacctctctctctcgctcactcgctcgctcgctcctgctctggccatgtgacgtgcccgctcccccattgcctttcaccatgattggaagcttccggaggcctccccagaagctgagcagaggccagcaccatgcctcctgtaaagcctgcagaaccaggagccaagtaaacctcttttcattatttatttatttatttatttatttattttgacacagggtctcgctctgttgcccaggctggagtgcagtggcgtgatctcggctcactgcaacctctgcctcctgggctcaggtgatcctcccacctcaccctcctgagtagctgggactacaggcacacgccaccatacctggctaatttttcatattttttgtagacatggggtcttactggcccagactggtctcaaacttctgagctcaagtgatccatccaccttggccttccagagtgctgggatcacacgcatgagctaccatgccggccctcttttcttttaaaattgcccagtcctaagtatttctttatagcaaggcaaccacagcctaacacagctcacgatgctgaggtctcaaaagttcaagatcgggcgtctgcctctagtgagggccttgctgccgctgcctccactcatggcagaaggtgaagggcagctggagtgtgtgcagaccgtgtgcgagagggagctggaggagtagggaagtacaggcctttttttttttttttaagatggagtctcgctctgttgcccaggctggagcgcagtggcgcaatgccggctcactgcaacctccgcctcccgggttcaagcgattctcctgcctcagcctgctgagtagctgggattagaggcatgcgccactatgcccggctaatttttgtatttttgtagagacggggtttcaccatgttggtcaggctgatcttgaacttctgacctcgtgatccgcccgccttagcctcccaaagtgctgagattataggcatgaggcaccgtgccggccgtgcaggtgtttttaaaagcacctcttgctggaactagtaggagtgaaaactcactcattactaagaggacagcaccaaactgttcgtgaggaatctgcccccatgacccagacacctccaacactggggctcagatttcaacctgaggtttgaaggggaccaacacccaaactatagaaacagagaaagaggaaagtttacagatacccatttagaaagaatctgctaacaaagggaaagaatcaggctgggcgcggtggtttatgcctggaatcccaacactttgagaggccaaggtgggtggatcacctgaggtcaggagtttgagaccagcctggccagcatgtgaaaccctgtctctactaaaaatgcaaacattagccaggcgtagtgacgtgcacctgtagtcccagctacccaggaggccaggcaagagaattgctggagttcatgagacagaggttgcagtgagcagagatcctgccactgcactccagcccaggcaacaagagcgagactgtgtctcaaaaacaaacaaacaacaacaacaaaaggaaagaatcagactggcttgggactctgctgtcccctgcccgtgacctcccaaaagcgtgtgttagagactgacctgcctagtgcgtcagtggagggggcactttggagaggggcttggatcgtgaggccccgccctcgtgaatggctcagtgccttgtgaaagggcttgatggagggagtttggtcccttttccccttttgtctctctgctgtgtgaggacaccatgttcctcccctctggaggatgctgtaacaagctgtcatctcgggaggagacaccaggccctgaccagacgctgaacatgccagcaccttcatcttggactttccagcccccagaactgtgagaaataaatttctgttctttataagtacctagtccatggtgttttgttacagcagcatgaacagactgagatagcggcttacatgtaaccggaagctgcagaaaaacatcttcagacagctgagacggctcccaggactcgtgcctggcacagacaccatctgcctggcagggcaaagaaaggcgtctgtgagtgtgggaggattccgagtctaacaccctgagcccagccaggaaggggccaggaaggcctcctcgtgaacaacgaatgaaacagatcccagatctcagacagggcggggaaggggaggggtaccatgtcaagcagcactctgtgtaagtcggcacctgcgcacacttgcatgcagacgtgtgtattgtgagtgtatggacatgttagaaatggatgtgtgcatgtgtctgcatgtgtttgtgcatttatgcacagacactacacgggcatgcacatcatgtacgtatatgtttgcatatgtgcacgtgtgtgtacgtgcatgtgttcgtgtgtgcatgcacacagcatgcgtgtgtgtgtatacttgcatgcatgctaacatatggtggagaataaataatgatcacctctctggaactggggaaagtaagtgttaaacagattttcgacaggaaatgctgctgcaaggaattcgtccgtaggctagcactacaacctggaggcagggagcagtgaggagtggaagtcttcccatcagaagtgaggaaggctggatacggtggctcacaccagtaatcccagcactttgggaggcaaaggcaggaggatcacttgagcccaggagtttgagaccagcctaggcaacttagcaagaccttgtcttaaaaaaaaaaaaaaaaattttacaaggaactacacagatggcaaaattaaaaaaaaaaaaagtgggaagaggggagaaagggagatcaatgtcttctacagatttcatcttatcgggtggagggtgtgaggagtagagccacgtggtgggaaactgttggtgtcttgtttgcgaatgactttggaacaaagaccacctgataagcacagttaaggaaggaaaacacacagggacttcccagggagccaggaggacactgggggagcaggaacacctgcctttcccatggggccctggtgtgcccagccccccacttcatgtctgacccacgtgctctccggctgacctcctgggactcgcacctggcccccacttggtatctgagccacgtgcttcccggccctcacttggtatctgagccatgtacttcccggctgacctcccgcaacgtgaagactactctcgctcccttcaaggccactgtccccaccgcagccagagaggtgttttatagttcaaatcctgcccaggcaccatcttgtctaaaggcagccctgagccggaatctgtgtgctttgctgatgggactgtaaaatggcgcagtcacttttgaaacagtctgacagttcctcaaaagcttaaacatagacttaccacatacccagcaattccacgcccaggctctgccccaggagaattgaaaacatctatccacacggaaacttgtacacaaatgttcacagttgcactatttatcatcatcagaatgcctataattgatgaacaggtgaacaaattgtgctatatccatataattaaatattattcagtcataaaaaagaatgaggccgggtgtggtagctcacgcctgtcattgcagcactttgggaggccgaggagggcggatcacaaggtcaggagatcgagaccatcctggttaacacggtgaaaccccgtctctactaaaaatacaaaaagaaattagccgggcgtggcagcgggcacctgtagtcccagctactcgggaggctgaggcaggagaatggcgtgaacccaggaggcggagcttgcagtgagccgagattgcaccactgcactccagcctgggcgacagaacgagactccatctgaaaaaaaaaaaaaaaagcagcacatgatgctcagcagcagcagaagcaagtctcaaaagaccatatactgtgtgagtccatttacacgggatgtgcaaaataggcagattcatcgacagagaccttggatcggcggtcctcaggggctgggtgggatgtggggagtgactgctaatcgggagggggtttccttccctttcgagacggtgaaaatgtttcagaactaggcagaggtgagggttacataatattgcgaatatactaaaatgaactgaattgtacacttttaaatagttaaaatgatgaattttgttatgtgaattttgcctacatttaaaaaaaaaaaggccaggtgcagtggctcacgcctgtaatcccagcactttgggaggccgaggcaggtggatcacaaggtcaggagttcgagaccagcctgagcaaaaaggtgaaaccccatctctactaaaaaatatgtaaattagcccggcgtggtggtgcgcacctgtagtcccagctatcgggaggccgaggcaggaaaatcgctggaacccgggaggcagaggttgcagtgagccaagattgtgccactgcactccagcctgggcgacagagtgagactccgtctcaaaaaaattaattaaattaaatttaaaaaaaacccaacctaggcaactagtgagaccttgtctctacaaaaaaattaaaaattagccaggtgtggtggctcacgcctgtagtttaagctactcaggaggctgaggcagaaggatggcctgactacaggagtttgagaccagcctgggcaatatggcgaaaccccatctctacaaagaatacaaaacttagcccagcgtggtggcgcgtgcgtgtgattccagctactctggaggctgaagtgggaggattgcttgagccctggagtttgaggcttcagtgagctgagattgcatcactgcactccagcctgggccagagcaagaccctgtctcaaaaacaacaaaacaaagaggctgggcacagtggctcatgcctgtaatcccagctacttgggaggcagaggcaggaaaattccttgaacctgggaggcggaggttgcattgagctgagttcacgccactgcactccagcctgggcgacagagtgcagagcgagactctgtctcaaaaaaaaaataataaaccaaaacaaaacccagaaacaaaaacaaccaccaaaacccatcaggtagccctgagtccagagccaacttcaaccaccaaaacccaccaggcagccctgagtccagagccaaattcaaccaccaaaacccaccaggcagccctgagtccagagccaacttccttgctgggttagaggtcctcacctcctgccctccccgcaggaaccacttgcagcttcctgaaggcatcaatgtcaccccgcccctgagcctgggggtgatgaaggtggatgagccagccctgcacaggtgaaggccactgacagctgcacaaggggggctgcggtttgcagcttccagcagcttccagggggaggggacctcagcccgatgaaggatgccagcgtggaggttcccaggtgggacctgggggtggtattccaggagctagaggcaatatgtgttcctgcgtgtgagcatgtatgcgtgtgtgcatacaagtgtacatgtgtgtgcacatgtgcatgtgtgcccgtgtatgtgtgtgtgttcatgtgtgtccatgtctgtgtgtctgtgtgttcatgtgtgtccgttgtgagcatgtgtgcatgtgtccatatgtgtgcgtgtgtgcctgtgtgtgcatgtgtgtccgtgtgtgcctatgtccgtatgtgtgcatgtgtgcctgtgtgttcctgtgtgtgtctgtgtgtgtgtgtgcctgtgtccgtatgtgtgcatatgtgcccgtgtgtgcatgtgtgtgctgtgtgtgcacgtgtgcgtgcatgtgtgtccgtgtgcatgtgtgcatgggtgtccatgtgcacgtgttcacgtgtgtgcatgcatgcatacatgtgtgtgcgtgtgtgtgttgggcaaacctctcacccacctgctggccaagggtaactctaggaagtgctgggatcacccagggctggggttagacaggtgcacaggtagagctgaggaattcagcccttcaggttcccagggctcctagccagcactggtgactaattgggcagaggcgagcaatgcccagcccacgccaggaaggaacggaagtgagttcatgtcccacctcccacgacttaacccaggcacagacgaggccaccacgaaggctgggactgtaatgaggttgccctagaggtgccctgtgcaatgcggcagccgccaaccacgtgtggttatttaaattaattaaataaaagtaaaaagcagttcctcaggctcctaagccacatttcaagtgctcagtgatactcggagtgctcagggctgctggagaccagtggtctggaccagaggtgatttcgttccccaggagatgtggctgccgccagagagaatggcctggccatgagtcagtagggctgaggcggagacctcctaccccctgccccagacccagccctgatttgtgccctggcagcatccagggtaacagctggctatgagggagagctttccatgcatgtggctcctgccatgctggtttacctggtcaggtgagggtgtgagccttgaagaagccaggtgggaggagggtttgattgcgctggccctgggtagggctaagggtggcccacgtctgtggtcatggcacggcagggggctgcatgcccctgatggagttgcttcccatcagacattttgagtcctgagctgggaacctgttgggggtggaacctgccccgtacctggaccctcacaccttctcccacctagcccatgaggtgatgggccatctgggctgggtgttgccccagtttttgtgtccagaggttttccagggttcccaggcccagccctgcgtccctggctcaggagcaccctccctcagccctggggcccgtccttagctcggcagccctgggcaaatcgtgtatcccctagtcagcttctccagggtgaccggcagtgactgaagtccctgttccctgttccaccctccctgcgcagggctgggcacaccgggcgccgtcagtacactgtctgcaatggccgagaaggcagcgctccatgcaggaggaacgatgcgtccttgccactgccctcatttgtgacttgggacagctgctcccagcaggatggtgtcctttcctccagagccaggggaggagtgaggcctggtgcccgggcggtacctgcctcacccaggtcgcagagagctattcctcggcagcctctgccactggaggtgtgggcaggtggtggggtgatgcccacacgagtgcagtggatgcggccctggcccagcctgcaggaagttggaggggtccccatcagagctggggctgctgccccccattcccctcccaccaatgtgtcagggcaaaactggaagggtcatgcctgtccccagctcccagaggtctcgtttctctctcgtggctggcacagagccagcagagaggcccagcctgcatgctcttcagcgccccaggcatcatcccagccggctggggagcgtctgtgcccagatgccctcgacatccctcttctctgcatctcacagctttgcggggtgactgggcatgagtcatcagccgctgaggcctcccacctgccccaagtgagcacggcctctgcaggggccacccagtgaatcggcagccatgggaacttccctagcacctcctccccagggtgtccacccaggccacctcctttctctgccgcctcctccaggcaggacatcccacccaacttagctggcagagctctagaggtcaggctgagtgaccaggtaacacggggtagccctggccagtcccaagcatgttccctggggaggccactgggaggtatgtccctggggctggagcaggctgagggcattctgggtcaaattaaggcaagatttgggacctctgaaacagagctctgagcacatgcttggaagctgggggcgggtagaggagctgctgggagggcccagcacagtgcgggatgcaggatgcgggatgcgggatgctcagggagggacaaggagggacggccgcacaactgttagagctgtgatgacgtcgaggaacagggaggcattgaaggcagctgactccagaccagctctgtctgctctaacgcagcactgaagcatccactcaaggcaggcaactcaagtcagagcagacccaaaggaacaaagaggaaaaaattaaaaaggcagaaagcaggggccgggcgcggcggctcccgcctgaatcccagcaccttgagaggccgaggcgggcggatcaccaggtcaggagatcgagaccatcctggctaacatggtgaaactccatctctactaaaaatacaaaaaattagctgggcgtggtggcaggtgcctgtagtcccagctactcaggaggctgaggcaggagaatggcgtgaacctgggaggcggagcttgcagtgagccgagatcatgccactgcactccagcctgggtgacagagcaagactccgtctcaaaaaaaaaaaaaaaaaaaaaaggcagaaagcagtgggggagggagagggaagaatgaggattaaaaacccaaaaactggaccgggcgcggtggctcacgcctgtaatcccagcactttgtgaggccgaggcaggtggatcacgtgaggtcaggagttcgagaccagcctggccaacatggagaaaccccgtctgtactaaaaatacaaaattagccgggcatggtgatgcaggcctgtaatcccagctactcgggaggctgaggcaggagaatcacttgaacaggggtgggggtgggggtggagattgtggtgagccaagattgtgccattgcactccagcctaggcaaaaagagcgaaactccatctcaaaaataaataaataaataaatacaaaaattagctgggcctgtagtcccagctactcgggaggatgaggcaggagaatcgcttgaacccgggaggcagaggttgcagtgagccgagattgtgccactgcactccagcctgggcaacagagcgagactctgtctcaaaaaacaaaaaaaaaaaacccaaaagctggggcgtgggaggaatgaccccgtgaaagcaccctgcaggaatgaagaaaggaaaacgcaagacagcacaaacaaaacacaagaaaggaagggactgcagagttttaaataatagaattggaaacatttacaaaccaataacattgaaaaccgacatgaagttgctaaactcctagagaactataaaatgagaaaaacaaaacaaaacaaaggcaaaaaactgaatagattaaaagtgtgtgttggggccctcccctcctccagcacggggcctaggctgctgtttgagtgagttccactgagcttcccggggccagttgattcctgtcttggacaaaacgttccagaaagtcaaaagagtgggatgtgtccagcccactttataaggctaggatgacagcaactccaaaccaacaagaacagacaaaagcagaacatgagaggcccgtttcactccggattttaggtgcagaaaatacgaaataaaatattaggggccaggtgaagtggcgcatgcctgtaatcccagcactttggcaggctaaaagggcggggatcacttgagcccaggagttcaagactagcctgggacacatgctgagaccctgtctctacttaaaacaaaaaaaaaattaaaaattaagcccgggcaaaacagagtgagactttgtcgccatgaaaaaataaaaaaaattagccaacgtggtggcgtgcacttgcagtcccagctacttgagttgctgatttcgggaacatcacttgagcccaggagtttgaggctgcactgagccgtgatcgtgccactgtactccagcctgggtgacagagtgagctcctctctctaaaaaaaaaagaaaagaaaaaagaaaaaatttgaaataaaatattggctaactggacctcatggtctgagtttctctagtttaatatcagacgatatcagtgcaatttgttccgccaatacgctacagaagaactctaactcaggcatagaaaagcattagatggaatataattgatttcacctactttgtttatgattaaaaagctcttagcacaatagacatacttttcaatggtacaggttagacacccatgtccacaacaaccacgtatatgatggagaaacttcagtggctgagtccatgaccaggacaaaatgcccaatgatgtgctcctggttcacaccaggagcctcagacactcacgtggcctcagagacacacgatccagcaatcgtgctctttggcatttactcagctgggttgaaaacttatgcctgtacaaaaatcttcatgtgaatgtttatagcatctttattcatcattgtccacaactgtccaaactggaagcaaccgagatatcctttctttggtatcagtacatccattcaatgacataagatagaaggtgccagcacgccacaccaaggcatgcgtgaattgtgaatgagggtgaaagaagccagtcggaggctgggcacggtggctcacgtctgtgatcccagcactttgggaggccgaggcggacagatcacctgaggtcaggagtttgagaccagcctggccaacatggtgaaaccctgtctctactaaaaaaataaaaaataaaaaaataaaaatttagccgggcgtggtgctgggcacctgtaatcccagccactcgggaggctgagggaagagaattgcttggacccaggaggcagaggttgccatgagccgagatcacaccactgcactccagcctctgtgacagagtgggaccttgtctcaaaaaaaaaaaaaaaaaaaaaagaggagagagggaggggtgaacaggtggaacacagaggattttaggacagtgaaatgattctacgtgatagtgtagtattctactataatgtggtagtattctactataatgcggaatacacaaaactacacgtgtcaaaatccatagactgtacaggagagagagttggccttaaggtatgcaaatttaatcacttgggagatggaggatcccagcatggaattcagactgtgacaagagactctaactgcattacagatgcatgggtgcactgtctgcaatggctgagaagccagcgctccatgcaggaggaatgatgtgtccttgccactgccctcatttgtgacttggacagccgctcccagcaggatggtgtcctttcctccagagccaggggaggagttaggcctgatgcctgggtggtacctgcctcacccaggttgcagagagcctcacggcagggtgctgacctaagtaactttggacacgcgtggagtctgtaggactaaagacagaggatgtcaacacttcctctaggtgataaaggcatttcccacggggataccagctaataattctgaaaccactatacatctactctggaagtgaaaaactgagtacgtggtggcaggtggtaggggtcaggtttctcactatgggaatgggagcttccagataaacaaatggaaaggctagaatgatccatgtggtaacagaattagagacattggtataatttcatgcttaatgtagctacttctggatatgtgtacaaacagatgtgtatacacacagcttcgtatacacacatctatctctttgttctgtcagctgagaagcaatgagcacacttagccttcagatcttggtctctaagacccttctccagttaaaagaaccacaggtccttggctaagtggctgatttgaggactggaacagcaaatacataagatgatcctggagtgccttgcagtgctagtgttatgggctgaatttctttgcccccaaatcacaggtggaagccctagcccccgatgtgactgcatttggagatggagcctttgaggaaatgattaaggttcaatgaggtcatgagggtcaggggccctgatctgattagattggtgtcttttttttattcagtagaggcagggtctcactatattgcccaggctggtcttgaactcctggactcaagtgatcctcccgctttggccttccaaagcgctgggattacgagcatgagccaccacacccagccaagactgttgtccttatgagaacaggaagaaacaccaggagtgagcatgcagggagaggccacgtgagcacacagaggagaggccacgtgagcacgcagggagaggccacatgaggacacagggaaaggtcatgtgaggacgcagggagaggccacgtgagcatgcagacaggctataggagaatgcagggagaggtcacacgaggacgcagggatgctgtctgtaagccacagagaggcctcaggaggaacccaccctgccggcagcctgatctcagacgtccagactccataactgtgagaagagaaacacctgttgtttaagctgcccaggctgtggcatttagctgtggcagccctggtaatatagttagaaggtgaagaagtgatcgaaaaacaaaaccagcaccgtgttggctcataacttgcagcataaatctccacaagtccgtaccgatataaggaaatgactgagtaaataaataagtggggaggagagatgaatcacaaaggaattccaagtagtttgtgtagacactctgcccctaaggaggggagcctaacccccacaccttccttgggtgctgcaaatactgacttccccaccaagggcaccatgtggaaagggggacttcgtggtggagaaacctgacaggctccgcattggccaggtaacccaggccagccccacctgtgacccggcaggtggagaccatacacccttggtaggctgcgatgaggacgggacttcaaccctgcggtcttcctcccaaaacccatatcccctgtctaaccaggagaaagatatcagaccaatccccacagagggacaccctccgacacacctggccagcgctcctcaaaactgccaaggtcatcaaacatgagagaagctgagaggagcctgagacccgaggactgagtgtccaggatgggctcctgggacaggaaaaggacagcaggtgaaactgaggcaataggaatcaagtgcacaccttagtcaattacaatgtgtcagtattggctcattaattacataacaaacaccaaactaatgtcagatgttaacaacagtgccctcctatctatcttcacatcttatctggaaacccagatctattctaaaataaaacatttatctaaaaataaaaaggaaaaagttgctgtaggttcctgattgctcccatagcaggttaggctctcccccgtcgttcctagcttgctaatagtggtaacaacaatggccatttaaatctaccatctcaagatggaaaaaacacatgtacacaaaacgcagtggaagggctggctacgagtcagaggaatgacagcaaggatggctgaataacaaagaaacagatgaaatcagaggagccttgcctgttctgaccatattctacacctgggaccctcttcgggaggcccagccaaagaaagaaagaagggccaggtgcggtggctcatgcccgtaattccagcactctgggaggccaaggcagatggatcacctgaggtcaggagttcgagaccagcctggccaacgtggtgaaaccccatctctactaaaaatacaaaaattaactggctgtaatcccagctgctcaggaagctgacgcaggagaatcgcttgaacccgggagacaaaggttgtggtgagcagagatcgcgccactacactccagccttggggacacagcaagactccatctcaaaaaaaataaataaaaataaaaaagaaggaaaccggctgtggattgtgttaagttaaaaatcacaagatctatacactcagaaaggagactttacttcttataaagtcttatagcctgtaaggtggccattctgacaggctaggaagtgtggcctccagcctaaggccagagacaggtacttggagggagggtgcggtgagacaggaatgtaagccgaatgggttggtcaggtatacatactcaacaagttacaggaggcgttgcgaatatacatgcatgtttattcggacacgtgtgctggataaacatgcatgttacatatgacccatgttcaccttggggtgaaggcagcatgtaagcgtattacaattaggtggtatacctcaaaaagtactttcaggacatgaaggcacatgagggtgcaatctctgtaaaccagccagaacccgtctatggtcagggtctcttatcagggaaaagttactgaaacgagtctcttgtccaaggaaagctctagttacggctggtggagcaggggtgtggggccagggtcggcagggggaggagctgcggttgtttcaatgctgcttatcttgaggctagtgcttgtttagctgctacagaaaaagagaaacctgcggcctttagaacagagttgattcttcacgtgcagggatgcacgacttactttcaccaggcctggcctgaggtcctgtttataatttggtattttattgccacagagcctgttcttagtcttatgatctctattttaacatgaacaccggtcaattctgtctaaaccacacaagggagggggtagaatgaggtgcctctgacctaccatcccgtcacggctggaaactcagttttttggcttttttttttgagatggagtctcactctgttgcccaggctggagtgcagtggtacgatcttggctcactgaaacagattcaagcaattttcctgcctcagcctccagagtcgctgaaattacaagcatccaccaccacacctggctaatttttttgtatttttagtagagacggggttttgccatgttggccaggctggtctcgaactcctgacctcaggtgatccacccgccttggcctcccaaaatgctgggattacaggtgtgagccaccacgtctggctggaaactcagtttttaaggtgtctctgggaccccttggccaagaggggtcttttcagtagttggggggcttaggatttttttttcttttttttttttgagatggagtctcattgtcacccaggctggagtgcagtggcacgatctcaggtcactgcaacctctgcctcccaggttcaagcgattttcctgcctcagcctcccgagtagctggaattacaggtgtgtgccaccacgcctggctaatttttatgtatttttagtagagacggggttttgccatgttggccaggctggtctcgaacccctgacctcagggtgatccacctgcctctgcctcccaaagtgcggggattacaggcatgagccaccgtgcctggccaagattttatttttagtttacaattggaaggctagtgggccggtgcagaatctcgctgacttttgggtgagcatgttgagggccccctgcgtcagctgctcttctgttgaacggtgcagggtggggaggcctgggctgcactggccacacagtcccctcaagaagatcttctacgtgaaacaaaggagcactgagcgaggggagctctgctcagaaaggaccatcttgcatcactgaaattgtgggaaatgataacaaaaaattgaaatgtcgtgaagaaacacaccaataagaccatttttaaatatacagaggaagctagaaaatacagaaagaggaaccattcggacaagatactcaggaaatatccaggattgttatacctaaaacagccctcactgcccccctcctggcagcgcacctgagcccggagcctgccagggacagctctgaggagccaggcagggccagggatgggctctgaggggccaggcagggctagggatggactctcgtgcctgcctgcttgaggcttccttggtcagagcgagcgatgccacctttaggatggccagaattagcaaataaaaatatgggatgccgataaatctgtacttcagataaacaatttttagtacatgcccaacgcggtagaggtaaatctataggggctgaagcagatttgctgggccgtgggcagggtggggagtgaacgctcatgggcacggggtttctttctggggcaacagaaacggtgtcacatgagatagtgagcatggccgcccatctccgaatatacggcaaagccataagctttcaataagtgaatttcacagtaagtgcattatatttcaacaaatctgttttaaaatcttaactgagccgggcgtgctgtctcaggcctctagtcccagctactctggaggccgaggcgggaggatcgcttgaggccaggagttcaagaccagcctgggcaacatagcgagaccccatctctacaaaaaacacgttaaacaaaaacgttaattgggcgttccgtgttgtatccagcaatcctaaccgccctccgtccccgcgagccccagtccttcccctgcggctgggctgggtcccccgtcccgggcggtgagggcgccctgcaggcgtccacagagctgggcttccgtggcggcaaccctaaccccagcgccacctggtacggcccggcccgcgggtccctccgggtcaggacgcagacgcgcccgcggcggtaaccgggggcccgggggcctcgggcccaccccggccagaccccggggaggagcgcaggacactgcccgcgccgggactcggctgtttccgatcctcccgggcgtcctttaggagactcattcgcagccgacgttgcggaggcgcaggaaaagggcgagcaggtgcctcagggacaccacttccaaccgcacgccgatcgccggctccaccataaatagaaacgggtggtctctaattggcctagctctaattggcctagctgttgtcacgtgctctccgatggcccaatcactaaggctggacgatgctgcactgtgaatggccaggcccgagtcatgtgcccggagagggcggggctgggcccttccgctcgccgcgtctggcgatcgcggctacggagacccaggagggcccggccaggagacccgctctctagagcggcgagggcaggggttgctagggcgccggggtcgaacccgcgcttcctgcaagtcttagggccgcatccctgccgaggcgggcgttgggaagggtgggagatgggaaggtgcggtggtgcggggaggggagggcgccgggaggggtcggagaggggtcgcgggttttggggctgcgaggagggaaggagggaagaggagggaagaggagggcaaggggaggggagggcggggaggagagagggcgcgggcaggggagtggagggcgcggggaggggagggcgcggggaggggagggcggggaggagagagggtgcggagaggagggcgggaaggagaggggacggggggagggaggggacggggggagggaggggagggtgggggaaggaggggaggggagggtgggggaaggagggaaggggaggggaggggaggagagggcggggaggggaggggagggcgcgggctgcggggctgcggggagggaggggcgggttcagggctgtgggccccgcccggggcaccgcctggatcaggcctgaggccggctgcagagaacttgggcaccgcggaccagattgctggtcaccaggatgaaaaataaaaaagacccaaacagctcccccgaccccgccttcgcgcaggcccctggcgttctgctcaggggtttttgtttaatgaagaacgtcaaacatctggcaaggtcggaatgattttgcgatgagcaccgcctggattctgcggtgaaagcgactgtgtgcgcgctcacggcctcgcctgtccctgcatcagcccatctcgtcaggcagatcaacatgaagctgtaaaacggatgacttaggccgggcgtcgtgatgggcgcctgtaatcccagctactcgggaggctgaggcaggaaaaccgcttgaacctgggaggcggaggttgcagtgaaccgcggttgcaccactacactccagcctgggagacagagcgagactccgtctcaaaataaataaataaaacatatgacttaggtatatacgcatggggggaatcctcgtaaggcaagaacgtgctgcacattctggggactgggacaggataagcacacgagtagatctaagtcactggaaatacctggttttgctgttggaggggggcttgcaggtgctcgttatattattacgctgttgtagtaaaacgatgttagttacagtattaaattgcaaatgtcagtatccatcaccgccaaaacagcgtgcataccactagcatatgatttttgtagttttttaatgttaagtttgtaatgaagtgcacaaacttaattatacattggctgaggttatttgttttaaaggcagtacttgctctatggcccaggctggagtgcagtgcgtgatcatggctcactgtaacctcaaattcttggcctcaagcgatcctcctgcctcaccctcctgaaaggactgggattacaggcgtgagccaccatgcccagcctccttttgctgagttttaacaaatacagtagtgtaaccgaagatgccatcaagacaaatagaacacgtccctcaccccagaaaattctcttatgcccctttccattctatgtccactgctaccatgccacctgtgctgatttctccactatgcttccgcctgttctaagagttcatactaatggatcattgggtacatgtccttgtgtaaggcgtctttcccttagcgtcatgtttctggagattcttctgtgttgtttcatgtctcaggagtttgttcttttgattgccaagcagtccagtgtaaacacaccggtgtgtttatctgctgtattcatggacacttggagctgtgtctggctattggcgatcacgaataaagttgctgttgactttctttttgaagtctttgtgtggacatgtttttatttctctgggcagatactgaggaatgggtcaaaggaaaggagtatgtttggttttatgagaagttgccagatttccccactggctgcttccatattagtagtggagtctgagtcttccatttcctccacatcctcacagcacttggtaatgccagcgtgtgtgtgtgtgtgtgtgtgtgtgtgtgtgtgtgtgtgtgtgtatgtgttgtagccgttttatttattttttttgagacggagtctcactcttgacacccaggctggagtgcaatggcgtgatcttggcttgctgcaacctccacctcctgggttccagtgattctcctgcctcagcttcctgagtagctgggattacaggtgtgcaccagcacgcccggccaatttttgtacttttagtagagatggggtttcactacgttggccaggctggtctcgaactcctgaccgcaggtgatccgctcgcctcagcctcccgaagtgctgggattacagacgtgagcccccttacccagcctggtaaccaccattctactctcctactaattccacttttttgcactccacatgtatatcagtgggatcatgcagatttgtctttctgtgcctggctcagtgatgtccttcaggttcatccgtgttgtcagcaatgacaagatttccttctttttaaaggttcaatggtattctaaggtgtaaatgtgtttttttctgtgggggataggtcagagtggtgtgaaaaactatagggaaaggacgcaaaccttctgaaagggcggagggttctgcagagctcccggggagaatagctgaaggcagctgtcctacaactctgaggcagagggcaaggagttggtacaaaggagtgtaggggaatttatcttaaacaggcttgtttacttatgttgaccaggaactgacctttgatcatccgtccaacgttccctgaaaggggaacgataaatgttaattacctacaggttgtgtgggctccaggttttcggcattgtgcctgcactgagtaaaagcagacagtggccgggcgcggtggctcacgcctgtaatcccagcactttgggaggctgaggcgggcggatcatgaggtcaggagttcgagaccatcctggctaacacggtgaaagcccatctctacctaaaatacaaaagaattagctgggcgtggtggcgggcacctgtagtcccagctactcgggaggctgagccaggagaatggcgtgaacccggaaggcggagcttgcagtgagccgagattgtgccactgcactccagcctgggtgacagagcgagactccatctcaaaaaaaaaaaaaaaaagcaagcagctccagcttctccaggctgttctctggccactagagccaggcagccccctagctggtcttacactgcatacctgtgtctgagtactcatttcacccgtcggccaggatctgcgggacagacccggcattcttcgttatccattcattcgttgacggacacttaggcgagttccgtaccttgattgcagtgactaatgctgccctaatggcatttcattggaaatgaactattacaggagggtttttgaagtggcttatgatccagaaaaggaatcttccaatacctctgtgccccaaaaccttgggtaaaataccaacagtgcagttggtctaaaaggcaccacttaaattgcgttgcagatgacgttgctaaggatggctttctggtctcctggttctgggcagctccctgcactgctggtttcagtcatgttgcaaggagagtattagcaactcagtagtgatgaggtttagtggacattttatttaacgttctgtcaaataggccaaatgaaatgttacatatgaaaagagcctatattctgatttctgcctggggatgtaaacattagcttgcatgatgcctggaagccccggaacctgagctcccaaccacctgccagctgctggctgcccctccctccctcctctccacccccctcagcctcctcttcctcctcccatccttccttcccttcccgccttcccccagcgccccatgaagctagttttagaatggctttttggagcagttatgttataaggattggcagctcatgagtttaatattcttatgggtcttccaaagtgcaaagagaacacaaagttacttttgcttttgtaatagagtaaaacgcatcctatcctgacctaagatgcacaaatcaacccatcttgtcaggcagataaacttctcataaacctgtaaaacatatgacttatgtatcccagtggtcttatctttcctatcatgagatgtctgctagtccatcatcctggaattatccatggaattatcacccatccatggctcccagctatgccacagtgactgcaatcctaagattgggcatccggaaggatggcccaacaccgtgccaccctgcagctttgccgcaagctgccctgggtcctgcatcctcttcgaggtggaatgagaacacagccgagagctcaggatcttccaactgctgcccacagtggcaaaaagaaacctggtgggagaagatgagtcagacggagccaggagcccgcggccggtgacgccagcggtgggggaacacaatgtcctgtgggtgatcggtgagcgagcggacggtggatttctcctgcagtcggtggcaggaaggatgtcatcacgcgctattttgtgaccagcccctggaccacaactcacgtgagcagaagggctttcttctttgcttaagatgtctgtgcttgcaaacttactggccacaggtacaaggaggttttctttgcttatgttcatattaaacatgttaataaaggtttttcttattgtccttgtttttacatttataaattactcataagctgacgaaacagaaaacagagactcatctccggttcccggtacagtgaggtgagagctgctgtgctgggtgcgggaagcgcctggccccaggttcctcctggacggaggccagaagggctgagcaagagccagcgaggctggggaggaggaggaggcgctggaacaggaacggccggccgggaggggcgaggctgggggacagtcacgcagggctgaggcgggcgtgtggtgcgggagcgtgtgtgtgcaggaagcttgtgtgcgtgcgtgtggggagcgggtctggtgagggcgcacttgggcctgagccccttccggcccctcgtgtttgctggaggctgcgtgtgctgtgtccccaccccagatgcttgccctgaggggcaggtttccatccaacaccccgattgtctccttcagtaaacccccggcaccgtctacccggaagttgtgggctgggagggatgacatgccctggggactgtgagcagtggaacccacgtcattgcaaggaaatgatcacacaaacaccagctcggcagagtggaacctttgccaaacctcagagctgcagcgagcggctgggcaaccttcctgaggacggcgccccctcgcccagctccaagctcctccctgtccccacaggatatccctggacctggcgggtcactctagccagagcagccttccacagtcctccagggtcagagctacagttgaggaccctgtaggtggtagaggtgcccggggccgggctctggggctggcagaggcaatgtcagcgcctgccacctgcgatgtggccagggaacttggggctgagcaagggcacagaggggagagtgtggcatgagggagaggcgggaccccgcagaggctcccacaccttccaaggcagcagaggagaaggggaggctgccaacagccagaccagggctccaggggggcggcagggggcccagggagctccgggaaatgggacagccactgtccacctgcagaacgctggcttaagccttgcagacgggcccagtgggcagggtcgtgattttcactcccgaagggcctggggtgacaagccggaggtctgggagatgggactggagaccgtgttcagaaggaggagctctccactctgttggcaaaagccctggagctccaggcatccacagtgaccgaatgttggtaaagtcccagaggacgggacccagggcatgcccctcactggacggtggcctcgggccctgcagggagttgaatgtggggtcatgaagatgtcagaattgcgtctgaagatgtcagaattgcatctgaggaggcaggtgggcacacgtgatgcagggacacgccatgcaccagggtgggttcagagcagcagaagctctagggggcacctacaggtttctataaaatgggggatttaaggggccttggccttctgcgactgtggggctggctgaggagcatctgggaagccacgtgggagctggaggtcacagggcaggccggcgggagggcagcggggcagggatttgggccccatctccaacactgagcctgggccgggcacataaagtccccacaattgctgtggaaagaaccaagtgaatgcctaacttcctgccagccttccaggagtaactcagtaaaacaaaaccaaccaaccaacaaacccagaagaggcccgaggtccatggtaaaaattcaagaggtggaaggggctggactatgggaccaaggtcaggtctttctccttcgagggaccaatgggtggccaggctctgaggctgcgaggtccccgacacggtgaggggcacgcctgagtcccggcctctgcatctcctcaggcacctcccacttttctggtgggttgctattttccttttcttttcttttcttttctttttttttttttgaggcggagtctcactctgccacacaggctggagtgcagtggtgcgatctcagctcgctgcaacctctgcctcctgggttcaagcaattctccttgcctcagcctcctgagtagctgggattacaggcacttgccaccacgcccagtgaatttttgtatttttagtagagacggggtttcgccatgttggccaggctggtcttgaacctcggcctcccacagtgctggggttacaggctgagtcctgcgctggccaggttgctattctcttcttgtgttgtgtgcattcctcttctattctgtgaacaaaacctggtgcaggagaccgtctgtgttcccaagctgtcgccaatactggactacggatttttgaagcttacaatttcatgggtgcaaattgcactttgcatttctgtaacagtgagtgcagttgggcattttcacatgtatctaagctgttatcttgtttgagaccggaccgtgcattcttctcttccttactggcttcgggacctctctgtgtgctgagaagatgggctgcttgcccactgtcccctgaagttccacacaccgctgactttggggtgtgagccctgctgctcccaacaaaccccagctctcaggctggctcttaaagtcccatactctgggccgggtacggtggctcacacctgtaatcccactttgggaggccgaggcaggcggaccacgaggtcagatcaagaccatcctggccgacgtggtgaaaccctgtctctactaaaaatacaaaatgtagctgggtgtggtggcgcgtgcctgtaatcccagctactcggaaggctgaggcaggagactcgcttgaaccagggagtcagaggtttcagtgagctgagatcatgccattgcagtccagcctggcgacagagcgagactccatctcaaaaaaaaaacaaatcccatactctgggcttcctaaccctggactctccccaaagcatgcagaacgtgtgggatgtacatttctctgtgagagggcgacagccctggggggaccttcccattggtccatgactgcccagccgactgggaattcaccttgaggtgccctggcggggaggggggctccatctcttgtcaaaagtctctgctacctctgggcctcagtttccccacctgttagcccaactcccttccaggccaggaagcgctggcaggcggtctcccacccacgccccgtcccgccaccagagggcaggcagtccttctcggctggggccagcccggcgcagctggcatttctcctgcaggatgccatggcccaccgagctgggaggccacatgctggagccgcctgcgggcagtagaggcctcagaggcaggcccaacccgggtcagggcaggccggggctggcccagaagatttcagcagagaggaggggttccagatgggcctcgggggaggtgtgcagggcgtgtgtgaagaaagctgccccctgggactctctcttgcccccggacgtggagaagcctcaggccccacaaacccagatgtacccagaaaggaggtccgggtggcactgaggtgccaggctgatgggggaggtccgggtggcactgaggtgccaggctgatgggccgaggtggggaaagggccaggaggggtgagctgggcaggagggggaccactgaagtgcatccctggggaccccaggccacagtgccctggatggctgggtgggcagtcgggttcagcccagacaccagggagcagggccggagggcacagcagcgcaggctgagctgagggctctccctgggaggagggagaaggtgacgcgggctttctcatcagggtgttgagggcaggggcaggggtggctcatgatggtgggaaaggggcaggggccttggagccctgggttggtgtggagagagggcccaggcaggggtcccagcgtgcttgaaagccagccctggggtgcacacaatgtccttcctggcagctatggggacaatgtgactggccacttcgtccgtcttaaggccccccactgtgctgtctcaaggccccccgcatggagtttggtgaccaggaccagggggtgcatgtccttgctggggccccagagctggtcccggagatggcaggagtgcaggggcttctggggtggacccctgctctctggcccatggtcccctagcccggcaagtgacagccctcagcagggaggttggggcccacggagctgggagagcagcagggggcctgtgcagactagcccggtccccagccaccacccccaggtgtgggaaaggcaggcgcctgggggatctgaggtttcggtcctgccccgctgagggtgtgggaggaacggtagaggactctgagggtcaaggcggtctctcctgggagtgccagggagggcctgtatcctctcacatctgggtgagaagggggctaccccacacgccctgtactccctttgcagtcctctgtctcccccacagggaccccagtttctgggccccccctcactgctcttcctggacccctcttgtcttcaaggaggggttgggtggggctggctcgctgggaagctaagcagcagctggcactgggcctccgctgcaggtaggaagtggtgtctgcgctggtgggaacgcggtttacccgcccacacaggctgctcggccctttctccgagtgtgaggtgtgcttggggaggccggcggccgagtggccaggcccaaggccttaaagagaagtgggtctcttcggcttcccaggctgggactttgaagaccagaaaacgtgaaattaggacccgccacaaggagagggagttggaaaagcccaggtccctttgcagatcacccccttgtactgaggtttctgaagctcggggtgagggcggatgcagggagcggggcagcctggtcccagagcccggggtctcagccaggcaggatcggcagtgaccatctcctggtgccgccccgggacctggctgccagctgctgctcctgggagggagactggggagggtgaggggatgcagcccccgacctgagcaaaaccacttccatggggcttggggcccctccccagagaagccctcttccaagtcaccaccagcgtacggacccaggaggcctgaggcaggcggggcgtcctccgtctgggtgaccctctcccggcctgcattatggggctgggagcggctgggcccaaagctgaaggcggtctttcgggtgctgagcctttagcagggctgggaagttccatccttcatgacagaggccgtcaggggctgctggggtagaaacccaggcaggggtcttattaggacaggcagtcctgtcatggatggaggagtcccaggtagctagggcgcctgctggaggccccaggccaggggtgggcggtggtttggagccctgctccgggggtgaattctgtggcagaagagagacagaggcaggatgccgcctccgcgaccactgtgagaatcagggagctcagcccccagcggtcagccccggcccgagtctcagcttgagcttgctgagcagctgggggcgtgggtctggccggctccgcacctctacaccgcggctttccctccatggccacggatggccaggcactccagccttggagccaggccttctgctccagcctctgggagccatttcccaaatcccacagcagcccccagtctgtgggtaaggaaggaaaggggcagctgtgtggccagcacccacagcgtcctcaccctcccccggtttctggcatcttcctccgtggtctagggcggactttgatcttcaactcaggaagcaccaagagttcgtgcacaggacggcgcaggctgttgccccagaagctaggggaggggtacccactgtgtggtctcacggtgtggagcacctggggtaggcaggctgagcgtgggaacggccctggccatttgcggtggccctggcctctggtgcctgtgtccctgtgtcggggggcaccgcgtcctgtgggtctttgcaccgcactgagcccctcctccaccctgcacagcttctgaagagctcatccagctgtggccacaggccctggtggcgactccccacttctgtggggcaggggaggttgaggtctctccggaggggacctctccttctccatcattgttacctggggcaggcgagtgcccttcagacctcgctgtcctgaccggggccacctcctcctggctcaggcttggttttattcaaggagaggctgggtctccctggctccctgtgagcccaagaagattaaatgcattaaacaatggggtgaagctgatggcttgaacctgagggagaggcggatgtgctcggggggcacctgaggagccccaggcccaggggtgtctccaagcaggccagccacctgccacagcctggagaccgggaggctcgagggtcccggaggctgcccaccggatgcagggcagcttgagagtctcagcgggacagcagctcccggcccggcggccgcccatcagtcagcccaccccactgtccttcaccactccagcaagtggaggggctgagggggcccctggggctgggggtgggaaggagaaggagccctgggggagaggggcttgtcgggcgagagaaggggaggggagtggaggggaggcgaggaagggaggagagaggagcagatgcgacctggccctgtcacggggaggctagggcccctctacaaggctcccgcccttcttccagctgccctctgaggccctctggcctctgagcaccaagagccccaggctccccgcctccaggctgctgggttctggccgacccaccctggtgggagccgactcatgttctccctgctgactctgcgagcctggaggtggcccggccccatccatcccctcccctccccctgctccccacccctccgctccttgcccccttatctccttccctctccctcctcccttcctctcttccccatgtccaacgccagctcccgggccccactccagctgcccaggccacagtgattccctgtcctgtcttctgaggccattttcccaacagcattggctgaggcaggaggatcacttgagcccaggaggtggaggctgcagtgagctgtgatcgcgccactgcgctccagcccaggcaacagaaagagaccctgtctcaaaaaaaaaaaaaaaagaaaagaaaaagaaaaagaaaaagttgactgagtgtaaaagtcacttattctgaggaacaagaacctactcctggctccagctttgctcctaacctggcatttggttttgaggatgttactcaggcccggagctcccattgccactcaactgggcatcctcgtgcctggggaggcccagcactggctctagggaaaacgggacatgtggaaggctgggggctggaaattcctgccatggggctcgggggtggtctcagtcctgcccctgagttcccggtcgacccttggagaagctgcggcagatgggatctctgacatgggatccgtgctggcgccctccctcctgcaacacagaactaacaaccccaccttcagggcctttgatgctgcgcacacaccaccggctccgcgaggcagcctgtctggctggacctcgctgaggcctgttcaccctgaagcacctgaccacagacctcagccctcttaaggccctggagggggcctggcaatgtcctcacccggctggggttgtatacaatttgctcaagctgttttgacagcagttggtccagactgccgtctcctctggcatcaggtgcccggagcagttctggggcccagctgagggacactgagctggggtgtttagctgggcttagcttagtggggtatgttgatggctgtgcagttgctccgagactgaggatgttgtttccagctgtctgagagagggatgttgccctggattgaatggtgtcccctgaaatccgtgtccgcctggaacctctgaacagggccttatttggagacagggtcttggcagatgtcatccagttgaggttactggatggccctgaatcccacgcggctggtgtcctgatgtgaagagagaaaccacaggcctgggagaaggccacgtgacgatggaggcagagactggagcggcgcaggcacaagccgggaacgccagggccgccggcagccccaggagctgggagaggcctggagcccgttctccctcagagcctctggagggaaacaaatgatgtcacgacactgtggccacctgaagaggcggccagagagcaggcagcaagacgaagcagcaaaaatacaagtgatccactctgctgagtgactgctccccccgaccctctgcgctgccctgcatgcgggcttccgttaccacaccgtgtgtgagcccccagaggcagcttcctgcctgtctgtgtggtcaagtatggttatctttgggtgtggaggaattaagaatttttattctctttttcttctttttttttttgagacagggccttgctctgtcacccaggctggagtgcagtggcacaatctcggctcactgcaacttcaaaccctgggctcaagatatccccctgcctcagcctcccgagtagctgggattacaggcactcgtcaccacgcccagttaatttttgtattttttgtagagactgggtttcgccatgttgcccaggctggtctggagctcctgggctcaagtgatccactcaccccggcctcccaaagtgctgagatgacaggcgtgagccaccgcgcccggcctcgttctcattttcttgcttagttcctgatgacagtaaatgagcatttaaacaaggtttcatgtacactgatgctagtgtctgttttctgtttcacaagcgtagaggtccatgttaactaattcatgacttagatctgaaggagcacattaaaagcttgggcttaaatgggtgatgtatctggttttctctgtggctatatcattcctggtttgcatgttttgtctttatttttagtttcacctgtgttcatactggttatatcttattctattgttccattttgtcagaacataagattgatgacttttgttttcttctggttcctatctgcctcataagttttctatccttttatttccaacctattggtgtccttttgtttaaagtgtgtttacaggtgtggtggctcatgtttgtaatcattgcactttgggaggctgagatgggagggtcacttgaggccaggagtttgagatcagcctgggcaacacagtgagacccgtctctacaaataattcagaataattaactgggtgtggtggtgcacacctgtagtctcagctactcaagaggctaagggaggaggattgcgtaagcctgagaggtggaggctgcacagagctgtgatcgagccactgcacatcagcctgggtgacagagtgggaccttgtctcaaaaaaaaaaggagaaagaaagaaagaaaagaaaagaaaagaaaagaagccgggcgcggtggctcatgcctgtaatcccagcactttgggaggccgaggcaggtggatcacgaggtcaggagatagagaccatcctggctaacacagtgaaacctcgtctctactaaaaatacaaaaaattagccgggcgtggtggcgggcgcctgtagtcccagctactcgggaggctgaggcaggagaatggcgtgagcccgggaggcggagcttgcagcgagctgagattgcgccactgcactccagcctgggtgacagagcgagactccatctccaaaaaaaaaaaagaaagaaagaaaagaaaaaaataggtatcttctgtagacaacatattgttgaatctttacatttatttatttatttatttgtttagagacagggtctcactctgtcgcccaggctggagtgcaatggcacgatcttggttcactgtaacctccacctcctgggttcaagtgattctcccacctcagcctctcgagtagctgggattacaggcacctgccaccacgctgggctaatttttgtattttttcttagagacggggtttcaccatgttggtcaggctggtctcaaactcctgacctcaagtgatctgcctgccttggcctcccaaagcgctgggattacaggtgtgagccatggcgcccggccacccagcttgatttctaaacctcatcttcatctacatcttgtttctgacaggagaaatgtctccacatgttgccacgtccgtcagtctccgcctccctctctccatgacattggtattatctagaattttagttctagattgttatgtagattgaacatacattgtagattctgcgctttttttttttgtcattgctttttcttttttggacaaaataaactatctgattgcttcttatttctcttgtaaggatcttcttgtttcggtttcttcttacttggatcctgcctccaagaggggtttcaaagttaacttctcggatgtgtcttaagaccttatatgcagctaggcgcggtggctcacgcctgtaatcccagcactgtgggaggcagacggatcacttgaggtcaggagtttgaggctatcctggccaacatggtgaaaccctgtctctactaaaaataaaaatacaaaaattagcctggcgcggtagcacacgcctgtcatcccagctacccaggaggctgaggcgggagaaaaacttgactccaggaggtggaggttgcagtgagccaagattgcaccactgcactccagcctgggtgacagagtgagactctgtctcaaacaaaacaaaacaaaaacccttatatgcctgagaatatctttattatatacttaaattttatgataatttagttagaggcgacattccaggtacaaacttcttttctttccacactgaagcatattttttccatcgtctccttgaacccagagttgtctttgagaattctgagatcatctgagtttgaggattctctgtctggttttgacgttctagtcctttgaatgtgtccagcaggttttccttctctctcctgtgtggccgtcgatgcactgctgtgatatgagcgctctctcttctctgcttctgggagatttatcgtcgttctccctctctttctctccctctctttctcatttattggatatgttttctcttccgttatctgtgtctcttagctttttctttttttctctctctattctttccttctgggggcttcctcagctggatcttgcctccctaacgcggctttcctgttgctcattccatccgtggtttccctgggtcagggattctgtctttcgtccctggcgtgccgcgccgcgtgggtgttgacggctttttcttcctgctcccgtcctttgagggtgtgccttttgctggccgtgacgggtgcagctctgccctggctccctcaggtgcgtgtggcccgtgcggccgtctgcttcccggacagagcgcccgcctcaggatgccagctctcaggccatgagcctcaagggcacccagatctggtccaggctttggggctgggccaagcctggagtgggaggggcgagcccctgggtggcacaggccctgcccctcagagccctctgcccgccttgacaaccccctccctgtcagccgctgttccttggccaacacctcgtgttgggagcttagttttttttttttctttgagatggagtcttgctctgtcacccaggctggagtgcagtggcacaatctcggcttactgcaacctccacctcccgggttcaagtggtcctcctgcctcagcctcccgagtagctgggattacaggcatgagccaccacgcccagctaattttttgtatttttagtagagacagggtttcaccatgtcagccaggatggtctcgatctcctggcctcgtgatctgcccgccttggcctcccgaagtgctgggattacaggcgtgagccactgcgcccggccaggagcttagctttaagagcttgaagtaggggctcaatggccaccctcgggctttggggtgaggggtgaatgctccacactgggggtttccaccactccccaaagcacggggctgccctgggctggtgcttactctgtttctcgaagtctgaaaggtttcccctcatggtcaagggctttactttctgtgtcctgtggtgtccagccaagcctgtacagttggggagcgtttgctctgacaagtattgtcttgtccccattttacgaataagaaaaccaagcccggagaggctcagtcctggaaatagacggtgggggaaacaggactcaggcagagtgcatgctctttgtcacgagaattcgaccggtgtgcacattgacccgacacgcccaggacacagcatgctcagtcaggggccctctacacctgagcctgggtgggggtggggacacactatgaaggaccctccctgtcctccaggtcctttcagtctggctgtggacagagaagtggagagacgattatgggcattgagatgagcggtggaggctggatggaatcaggaggaggggaggagaatcttggggagcacgggcctgagcacaaaggggattaaggaagaggaggacctcggggagcacggttctgagcatggaggagatgaggaggggaggaggaccttgcggagcacggccccaagcatgaaggggattaagggagaggaagatctcagggagcacagccctgagcacggagaggattaagggagaggagaaggaccttggggagcacagcctgtccctgcatggcctctggtccctggggtggggtcaggctgccggggatgcctcagatgacaggagctctgccgatgggctcgtggtgctctctgcttatcagggacaagaggacaggggacgtggagacagcactctggtgggagctgagggtcagggtgtgggcaggttggccagcacggcctggaaagcacagtcctgccgttgaggagagcacaaacccacctccctcatttacagatggcaaaggaaggcccagaagggcagtgacttgtccaaggccaccgggctgtctctcgtattggcggaggtcccctgtgtggagcgcctgggttcttggaacctcgagccccagccccttatccctgcgtccccttagcttttccctggtcactgtctgggtcccacccgtcagtgctggacgcacgggaaccagcatgagccgggcgggcacgcagctgctggtgaacaggtcccaggggctccccacatgcgggtaccttagtgacttatccatgtttacagaagagtttggtggtctcctggtgccgagggcccgagcatcaggttcagcgagagcagcagcggccgtggacaccgcagaggccaccatgagggcctggggacagtgtgacactgctgactgcagccctgggaacccgtgagaactgggggagcgtgtcctggaatgccaagcccgtcgtggctggcgactccctgccccggctaacacgccattgtcaaatacaagtcctgagaaagtacgagaaagaaggaactaaacccacagctcatcacccagagagaaccgttgttagcacctcgtaagtctattccattatttcagtcatgcagaaataaacatacatacaggtgtagccatgctcagcataaagatgttttggtcagccgggagcagtggctcacgcctggggtcccagcactttgggaggccgaggcgggtggatcacaaggtcagcagatcgagaccatcccagctaacacggtgaaaccccgtctctactaaaaatacaaaaaaaaaaaaaaagacgttttggtcaacgacgggcggcacatgccacgatggtcccatacgatgacagcagctccaccaggaagcctgggtgtgccctgggctctaagtctaggtcacgcaagcacactcggtgacagtcacacaatgatgacactgcctagcgatgcgtttctcagaatgcatccctgtaagcaacacgtccaccatctatattgtaacaaatgtgcctcatacgtctattctgcagccgtctgtgtggcttcacggggtcgtgtgaaggtcctagggtgaagtcacagatttttccatggtgcccttttattttttaagtattattattattattattttgatatgtagtctcgccttgtcgcccaggttggagtgcagtggcgtgatctcagctcactacaacctccgcctcccggattcaagcaattctcctgcctcagccacctgagtaactgggattacaggcacccgccaccatgcctggctagtgtttgtatttttactggagacggggtttcaccatgatgccaggctggtctcgaactcctgaccttaagtggttcacccgcctcagcctcccaaagtgctgggatgacaggcgtgagccaccgcgcccggcccatggtgcccttttaacacacgctgcatgtgccataatcactgtaacaaaattatcctgcttggagacttacatccttccttagttgttatatatatttttaagatagggtctcagctgggtacggtggctcacatctgtaatcccagcagcactttgggaggccaaggcgggcagattgcttgagcccaggagtttgagaccagcctgagcaacatggcaaaaccctgtctctatttaaaaattaaaataaatattaaaacataaaaaataaaaatactcacgaggtcaggagatcgagaccatcctggtcaacatggtgaaaccccgtctctactaaacatacaaaaaattagccgggcgtggtggcgggcgcctgtagtcccagctacccaggaggctggggcaggataatcgcttgaaccagggagtgggaggttgcagcgagctgagatcgcaccactgcactccagcctggtgactccacctcaaaaaaaaaaatatatatatatatatatataaaagataaagataaagatggggtcttgctctgccacccaggctggagtgcagtgacacagtcacagctcactgcagcctcaaactcctgggctcaagtgatcctcacaccttggcctcccaagtagctggaccacaggtgcacaccacgatacccggcttcagttgttaattttttaattgaaagttacattgcaatgaatatcactatacctctaaacttgtttctgtgcctaaagataatttcccaaagaaacttttatagaagtggaatttccaggtaaaaggggcattatattttattgtttttgtttttgtttttgttttgagacggagtctcactctgtctccaggctggtgtgtagtggcgcgatctcggctcactgcaacctccgcctcctgggttcaagcacttctcctgcctcagcctcccgagtagctgggactacaggcacccgccaccacagccggctaatttttttttttttttgtattttagtagagacggggtttcaccatgttgcccaggctggtctccaactcctgagctcaggcaatccacccgcctcggcctcccaaagtgctaggattagaggtgtgagccacctcacccggtcgcattatattttaatgatatttacatctttgcaaacccagttggcgaaaggttacctcatttcaactggtgttgcgtcgacacccagcagtgggaatggttcctgtgtctatcgctcatttttggaatttgcgtatttttagttggtgttttcttcccatggattgatacggctgtgtatgaattaaacatactaacctttgatttgtaatttacttgtcaaatatttcaccctgatttgtagacgtttgttgtttatttttgtttgtagtgtttttatagagtttaatagttcccactgtgcagttgattgtattagttttttgtctctgtgacctcgatggatgatttgatggtgactgcggtcaggggctccggagcctctgggtctgcagctgtcttctcagccaggcactctctcgtactgacgggggtcctccgtgtgcagggccgaggaaaccaccgtggccaaagtggaccaccagctgagcgtggctgggatgctagcagcccccaaccctgccggcctgggatgacggcggcctgggatgacggcagcctggggagagagggcactctgatttctcctcctgacggtgggcctggatgggctggagaggacttgggcctcggcccagaagctactccaggtgtcacagagaccacattcaaggttggaggccgccccaggctgcccatgtgaagctaggggtgctgaccagaggccggctcctggacgtgagtcctggacaccaggacagtggcctagagcctgcacagaggcagctggatgaggctgtggggcgcgtcctgcacaaggaggaccccgggttaacgcgccagtgcggcaggaggaagggcttgaggtgtgggtgtggggtgagtgaggggcaggtgtgaggggtgggtgaggagcctgcacataaggccccgcctttgctccccacctgtgtcgcaggaggcaatgaagtgcagtgtgtggcgccctagcggctccccaggcagtggctgagggccagtgcctctgtttcccccgggaatgggcgaatggtggctcctgtccccacgtgcagcatgggagctgcgctggctggggaaggtctggagagtccagctgggtctcccccggggcctctgagaacgaggaggaggcaccttgtaagacggggcagggaggggaagcgctcaggctgctgagtgaggcagccttgtgctcagcttgctggtcccggtgtgccctggggtcggcctcggaggcctcgggaggcggtgtcgctggagtgggggtcgggggcatggggggccatcctgaggctcctgaagggcccctgggtctggcctccacctggacaggtggatgtgcttcttctcaagggtgggaggcccccagggctcctttcagggctggggtgaggaagtgctcccttccccaccttcaaggccacagctgcagagccccaggcggaggcttggggagggtccgaagtgtcagccatctccctccctggctcctgctggctgaggaataaatgcagaagtcagaaaaggaagcacagaagcctttatttctggtacggctgggtgggggactggtctcctcccgtcctctgccgggctgcctgggggttgggggcctgctggtgggtgggccggcactgacaggagagggccgcgtgcccaggcccatcccacagaaaagccctccttggccatggtcgggagatgcagccaaaggacagtcaggcttcctcccggtggcggcgtgggctgggcagggaaggcttcccggaggaggcatcattgtccactgagaagcaccgtggggcctggccactgcctgtgtgtctgcttggagctgggcacggctgggcccttcaaactctgctgcagccgtgggaggacagcagggtgaggggtgtggcagggtggggggcatggtggggcagggaaggtgctggggggaccacaggcgggacgtgcaggggcccactgggtcactggtactggttgggggaggacagcgtgttgcagcggctgtgcgacatgtcctcgtacaccacacatgccgccgaattcttatcccgccacgagcacagtttctttatctgaaagacagaaccgccgtctccaaccagtggccagcgtggtgtcctggaccccaccccactccggtcagctttctaattttaacacgagacccccacggggctcctctgggctggcccccaggtctcctgagccccagggcttcccagcagagccttccccaggcagggctgggtcggaccctggggtgcctctgaagaaggagagtggaagtggcttggacccccccaccaagcccaagccaagcgggacccccactccagccccagacaaacagcagggaccgaggggagtggccacgcctagactctgtgtctgtctgaggccccctccccttcccacggccacacagcacgccggcacactccaacatgcacgcacagtcctcagagatccccacacacaggctcacacctgcacacgtgcacacgcgggcccagcgcctgggcgctccctcctctgcccgcacactccaacctgcacgcacagacctcagagatcccccctcagacactcacacctgcacacgcgcacacgcgcacacgcgggcccagcgcctgggctgctccctccccctcaggtcgctttggtgctggtccccctccctccccgccgaggccacttccaccctgagagttccagagcctgcagaggaggcggcgggtaccagggttttcctctggggctttggcgccccccacgctgctctcaggagagggaacaatctttggggtgcaggtggcagctggggctcacactgacctgtgtcctcgccagcacacacgccacccccaggcccagcccgaggaggaaggagatcaccgccagggccgcagggagggcagaggctgctggcgggtcagggagggcagaggctgtctgcgggtcagggagggcggagcctgtcggtggggcagggagggcagaggcccttggtggggcgtccgagcatctgtgccatccttgggactgttcctctgagaaggaaaaaagaaggaagggattctcccggtggagaacctgttagagcccccggggtttgggattcggggcagggaaaggctgtggaggggaggaggggcagctatctaggaggctgctgggggcagtgggctgggagctggaacagttcaggcacatgtaggagggagggtcccacgacaagggctgggggagcagagcctggccagcagctggggttgggaggggggtctgggatgggcacattccctacctgtcaccaggaccagggtgccggagccgtagacattgacctccgtgatggcctggcaggtgtaggtgccagtgtccgacagctgcaggcggtgcatggtgatagtcaggttgtcctgggaccctgagaagtcgatgcggccccggaaccgtctgtccgtagtgggcaccaccccgtcctcgtagtaaatgatgtcttggggctgtggcccgagctgcctcaggtagatcccacgcaggcccccgctggtggagcaggtgatgttgacggaggctcccacggggacagtcgtgcagtggggagactgctgcacctctggggaggacctgggctgtcaccatcagtctggccagaaggacagagaatgtcctccctgcaggggacagtggtggggatggtggggccctgagacagcccagggctgacatgtcgccaaagacacggtgccttacggggcatggagcagatctgggcaccggctgtggtgttgggggaggtgctgtcctcgtgttccgagactgtgggcttcttcctcccaaagcagcggccctgcctggacagccccggccactccccaccggggtccaccctttttccttctcttaaatgagtcctcagacactggaggccgctcagcaccccacccgcttcctgggggctgtgctgtggctcagactgggggctctgagctcatggggcagggagagctctggagctgtggccatggagagcctgggaagctcttaccttgggcagccagggccccaggcaggccgcgagccagcgccagaagcaggggcagcagcaggagcctcggaggcccggccatgttccccacacccagctctcccagccgggcgagtgcagctgagcctctctgggtctacaggaccccacagagagcagcacacaggagaccgcaggcgctcagagctcagagagggcttcctggaggcggtgcctcagaccagggtggtgctgtgggcccggtgggaggggcggtctcacctacccctccccagcactgcctccctgagagctgccctgagagcagggcgtccctgtatcccccactgcccctgcatctccacagggaggaggtcaaggcctggggcggggcagaccagaggacagagaagggactccctggctggggacgggtggcagggtctggaagtgagcggcagagctggcccccagcctgcctggtcctctggggtactttctgctgggacccaatttatgcccagaaatctggagccacccatgacccatgagtcacccacacagtgcagaggagcacagggcaggccagaattggcaccccctggtttggccgtggggaaggagcctgggcctgcacccgcacccaacgctgcagccgaccagctgaccgtggctctgcgttccatgtcctggaggcgggaggtctgaggtatggtccaggcctgaggtttcccgacctccctgggaggagtgcgtcaggccgcagtgcccagcttcaggggctgagggagacctgtgcctgggctctgaccccagggtgactgagtcctctgggagggggcacttctctgtcctgagggcctcccgccacaatgacgaagcgttgacgttggtgcccaaagccagtaggtgcagcacatgagcaggagtgtgtggacacgtgtgtgtgcagagacgggtgcgtatggacatgtgtgtgcagagacgggtgcgtgtggacacgtgtgtgtgcagagacgggtgcgtgtggacacgtgtgtgtgcagagacggatgcgtgtggacacgtgcgtgtgcagaggcgggtgcgtgtggacgtgtgtgtgcagagacgtgtgcgtgtggacgtgcgtgtacagagacggctgtgtgtggacacttgtgtgtgcagagacgggtgcgtgtgactccatgcgtgtgtgcagagacgggtgcgtgtggacacgtgtgtgcagagacgggtgtgtgtggacacgcatgtgcagagatgggtgcgtgtggacacgtgcgtgtgcagagacgtgtgcgtgtggatgtgcgtgtgcagagacgggtgtgtgtggacacgtgtgtgcagagacgggtgcacttgactccatgcgtgtgtgcagagacgggtgcgtgtggacacgcgtgtgtgcagagacgggtgtgtgtggacacgcatgtgcagagacgggtgcgtgtgaacacgtgtgtgtgcagatgggtgcgcatgactccacgcgtgtgtgcagagacggatgtgtgtggacacgcgtgtgtgcagagacgggtgtgtgtggacacgcatgtgcagagacgggtgtgtgtggacactttgtgcagagacgggtgcgcgtgactccatgcgtgtgtgcagagacgggtgcgtgtggacacgcgggtgtgcagagacgggtgcgtgtggacacgtgcgtgtgtagagacgtgtgcgtgtggacgtgcgtgtgcagagacgggtgtgtggacacttgtgtgtgcagagacgggtgcgcgtgactccatgcatgtgtgcagagacgggtgcatgtggacacgcgtgtgtgcagagatggatgtgtgtggacacgcatgtgcagagacgggtgcgtgtggacacgtgtgtgtgcagagatgggtgcgcatgactccacgcgtgtgtgcagagacgggtgcgcgtgattccacgcatgtgtgtgcagagacgggtgcgtgtggacacgcgtgtgtgcagagacgggtgcgcatggctccacgcatgtgcagagacgggtgtgcgtgactccacacgtgtttgcagagacgggtgcatgtgaacacgtgtgtgtgcagagacgggtgtgcgtgactcgcgtgtgtgcagagacgggtgcgcgtgactccacacatgtatgcagagacgggtgtgcatgaccacgcgtgtgtacagagataggagcgtgtggacatgtgtgtgtgcagagaggggtgcgtgtggacacgtgtgtgtgcagagacgggagcgcgtggacatgcgtgtgcagagacgggaatgtgtggacactcgtgtgcagacaggtgtgtgtggacacgcgtgtgtgaggagacgggtgcgcgtgactccacgcatgtgtgcagaggggtgcgtgtggacacacgtgtgtgcagagacgggtgcgcgtcactccatgcgtgtgtgcagagacgggtgcgcgactccatgcgtgtgtgcagaaacgggtgcatgtggacacgtgtgtgtgcagagaagggtgcacgtgactcacgcgtgtgtgcagagatgtgtgcccgtgactcacacacggacctgcagccctgagctccttccccagaagtcccagccacagcagccggtgcggagacacgggtggggctgtggggtggtgcaggttttctgctgggccgagggtcctgggggagccggttttcctcccccaggctctccataaacgagagacagagggtttgggggcagaatcttgcgcagagaccctggagcaccctagcaaggctgtggctcgaggcggtgggtaacagcacttgccggagcagcccctcctctggcctttgctccatgcatgcattgggtcaccaacgttcaccgggcgtctttatgccagcgtctgtgccaggagcagggggcagtgtggaccaggagccctcccgcctggagctgacctcagggaggccaggtggacagccagcaggacacagggtgtgggtgtggccctcaaaggccaacccaggaacgggccgtgggtgaaaccaactggggccccggggaacagcattccacgcagcgggatcagtagggcagaatccctgaggccagagcgtgcctggtgtgtctgaggacagcatggggccgggtggggttgggggctgcagagggagacacagacttccacacacggagggggaaggcagcgtgaggaccagcactaaatcccagtagggaaaacagaagcagagataagccaccaggaaaagatgaaaatcctcacggactccagccccaggctctcctcctgggtttcctgcctgggtgcgcaggggacatggcgaccgcactaccgatttcaaagtgactttgaggctgggctcaggggctcatgcctgtaatcccaacactttgggaggccagagtgggagaatcgcttgagcccaggaggtcgagccgtgatcgcgaccgtgtactccagcctgggcggcagatctagaccctatctccaaaaaaaaaaaaaaaaaaaagagaaaagaaaaaagagaaagaaaaactttgacctgaagacacgccaatgctcttcagcctgtgtaggcaggtgtgacccccgtgcgggggtcccgggcgctgtgcccacagaacagggtctgacccagcacgcggacggaaccttattttaacccgagacacaaacgcgcccctcttggaccctggctccggcccgaccctcagggcggccggctgtgcgaggcctcggtcaccgggcgccgccgcgtccctgcggggtctccacctggctgggggctcccccccgtcttcatctcgaggacgccttagggacgttttggggcttaaagccactaaagacgtttctttcagatttttgttttccattttaaaaattgcatttggagctacttggaggtttgtgagtcggtttgttttcttcatttcagatattcgagtcatggaactttttcaaagaactgaagggggattcccggtgatttttccaccccatacagatgaagacatcaaagggccccgccgcagtgacgaagacaaaagcatgaacagatctgggtccaaagaggctcggcaggtgcggtgggcacgagggagcgacccccgggtggccgagggactgagggatgcgcgtccagccccggagggcggcgtccacctgaccccccagcccgagccgccgccgccgcctcccagcccggcctgcgctgccccctggcggtggggccaggagccatcccagcctctaagcccccgaccctacctcggcccccggggctgccgcggaagggcccccaaagcctgctcatagccaagggacaggtatgtggccaaggccccccacagccctgaactggagtgtgtctgaggctccggcaggggccccctcacttgggcgcggagccctgggagtggagagagcggaccccacacctggggccggaccagcctggggtggcagaaagggagtccgggtctgtgggtttgatgagggcagagggaggggcatgcgtcctggtaagtcgggtgctgcggaggtgaggtggttccattttggaaactgaggaagcagagcttggaagacctggggggtggaggggaagggtctgcacgcacccaggagtgggtgacacagaggcccagcctgccaagcaagccggtgtctgtgccctccgggtgggacgagagacccaggccccgccacccaaggtcggcactcagggctggctctcctgtgtcctctctgccttgcaggcggctatgggtctgcggcatatggaaacaagggttggggggacagcagctccagggctccaagtggtgagggtttgaacaccagtgccagcggccttggggtgggctcggagtctggggtccacagttcagcggaggctctgctcaggccctgctgggctcccgctctgagggctgcgaccttcatctggggttctaggaggaagaacttcttctgcagggggaggaaggaggtgcctgtgtgagccgcgcgcccccgtgcccacagctctgccctggggcgtgcgttcacactcacgggcatacgtgctcatgcacacccccacccccaggcacactcccagccctcgcctgggttctgaaactgctggaggttgaacccactccccaaggcaccctcagcaagaggctcccttggctcagaaactccaagttccgtccctgatggagaccacgcaccctgccatgctgccctccagggagtcctggggacagtgagagcttgcaggaagggcagggcgggtctgggtggggagcctggctctgtattcttgaccatagccggctgggcccctggcggggactggctctctgggaccggtgctccccccaccctctcctggagccccagcaggtgcaggacagtaaggctgacctcagcctggggcagccccacccaagactccccaccccgcacaaactggggtgcagggcctcctacctcccggcgttgctgggaacagcggcacctgtaccaggcgaacatgaccagagcgaccaagaggatgaagacagcagtgaccaccgctggcacaggccagaacccagtgtcgggggcggactggggttctgcacctgaaggaggcagttcaggggtgtacaggtgggctgggcatcccccaccccctacctcctccgtgtagctcccagcctcctcctcctacacactccctggggtgagaatgagccttggaagacggcaccgccgttgcccaggaggtacaggggtgggagggagccaggaggagagggggcgcaggaccagaggtggaaggagacccagagcgcaggtgtgtcggggcagcgagggaaacatctacccctggatgtgccaggtcccaggagctgcgcgctggcccggtccttcaggcctcggggttctggggaagagatgcaagggcaggggaggggcctgccctgttgtggcccacccagggccaggtatctgaggagcctcatgcctgagcccaggaagggctcaccagatgccctgggggtggagagcaaagcggaacccaatttgggtgacccgggtaggtcggaaccgggtgtggtgaaggtgggagggctgggaggggccgtggaggctcctgagctttgcaggaaagggaggggaggggtggggagtgggtttggtgactagaggggtcagtggccccgcacggtggggtggccgctcagggcctagggagcaggtgggaggggcttggagggcagaacagagggcctgggggctgctctgctggccaccactgctttctggttgaaccagataagtagctggtggtgacggctgtgggccctgagtcgggggagaagaggcagagggagcagtgggctgggctagtggggacatgagtgggtggtgatcatgcctgtgtcgggggagctgaggcagagagtggggcagcgagcatcccctgagggcaggaggagaggggtggggacagagaagggtcgggggtggtcccagccctgaagacaggagtggcgagggcaggtgtggtctaggtgcttgtcgaggtggacaacatgggagtgggagtgggaggggcggggcaggaccgtggcagcctgggaggcccctgttcgtggtcactaagggtgctgcgcgggcgaccttgagcacctctgggtgaccccagtaaagggagggcaggtgcctcgaagccaggtgctgcgggtctggagggcctctcagagcacaggtatttggggtgcagtttccccacacagccggggtgggggtggcagggaggcggggggtgcctgggcttcctggctgcagggtgcagcccccacccctgacaggcagactgggctcctttgaggagcagctttgtgttctgtgttgtttgtgggactccggctgccctctgtgggtcccaccccactgtggggtctgtgccccctgagcctcctgcctgacccctgcccctcccaaaggaagaactgtcccaggaggtcaagaggcctccaccccaactctctacccgccaaccctgtctcctggcagcccggctcatgcctgctcttcttcctcctccttccctctcagtctcagccctccccctgcccaggccccctcccctccccgtgtcccctctcactcccctcccccttgcttccccgagcctcccctcacctgaaacctccagcgtgacttgtctgttatttctctggtgtcccacgaggtgccacatgtacagcccagcatgggagtcccgggcgcctttgatcaccagctgtgccacgcctccctgaacctggagctgccagccgtcccgggagaagtagcctggagccacctcattgaagatggcgctctcctgcccgtgggcacgcagcttgatgttgacatgggagaaggcgttggagatgttgcaggacatgacggtgttctcgccccaagacacagagactaccccctctgtgcagatggggctgtcccagcctgtagggccagacagaggcacacacggatcagggctggacctcagggcattggctggctgctgtgcccagggccagggccagggcaggagacagggcctctaagggacacagtgaactatgtatacatccacccgacccaatcagcacatatatctcgtgtgggaagaataaaatagcaacaaaaaagacgggtggctctgtgtgtgtgtatgtgtgtgtgtgtgcgtgctcacacccacgtctgttccttggggtgtgtcagcttggacgaaggcatttcctatcaactccctcccctgtatatttccactggggtgggtgaagtcagagcctcaggtgtgtgccgggcggctgcgctgtggcaggagtgctgccactgacctgccgaatcaccctcctcgtgggaagcagtggccaggccccaccgcccccagctccctcctgtttctccaaggcctaggccaggtgcaggtgctcggctgcgtgaggaagggcagggcttctgcagacacccacaggccagcctcagaggcaagcagagcagacatgggttccagcctgtccttgtggggcccagcctgcttgtgccacccccaacattccctttcccctcccggccacccgctcagctccaggttgctgggccagctccatacacagctccacagtcctgggaggtcaagtccttgacacaagccggcgtgtcagtctctctctcccgcctcctgggtgaaccctgccccatagcgacccgtgcagctgcttccctcagagggtctggggcctttgccccagcagccagctcaaggatgcctgagattcaggccgtcgggcccgagcatggtaccagcctgaggtcttggtgctgctactgtccctgctgcgtcagcgtccaccagtgactggacacggacggatggacggacagacggacggcagggtgagctctcggggagcacacagcatgctggttggagccgccatttggccacatttcaccaaatacaaaaccacatggtgggtgccatgtgctggcaagtgccaggggccttggtgcccatgggaggaggtgggcttcaggggcacctggccttcgggctggactgagtttcctctgacgagcaggctggctgcctgcctggacgctctgagtgttcagggactgcagggcctctaaggccactgcacaaattcacaccgtcccgagggcagcgggcggctgtccagggggtgccccagcccagttacactttggaaccactgttggggggtgggggcagaatctcccgaaaccagggttcttccacctgggattcttccctttcagttttgttttgttttttgttcgttcttaggattctgactgaactgctttgggatgtggtttgggatgtggctgagctctgacatcttttaaaagcccctcgggtggctcagtggctcacgcctgtaatcccagcactttgggaggccgaggtgggaggatcacttgagcccaggagtttgagaccagcctgagcaacatggcaaaaccccatctctacaaaaaatacacaatttagccaggtatggtgtgcatgcctgtagtcccagctactcgggaggctgaggtgggaggatcacctgagcccaggaggtcgaggctgcggtgagctgtgattgtaccactgcactccagcctgggcgtccagcctgggcgatagaggtagaacccgtctcaaaaaaaaaagataagaaaagaaaagcccctcaggtcactttgctgacaggttggggatctagagagctggggaggatctcactgggggaccctgttcaaatgcagatccactcctggcaggcctgaggtgcgcctgactaaggagcccccaggccagggctgctgtctgttcccggccatggcacaggtcgcaactgacccagaccctctcccttggaaactggtcgtgatcttggtccttccccacaattgctctgacagtgaccaccaggtaccacagcgggcaccaccgccctccacccacggcgggacacggcccactcaccaccaccctccacccacggcgggacacggtccactcaccgccacctgaggcagcccagctccacatggtcaggccctgggtctgcagagtcagtcattatcgggggtctggtggcacctggacccaacctcagtccacccctcctgcccctgtcatgcccccaccgggcccccctttccccagcagagaggcggggccccgagacctaccttcattctgagcactcaaggaggcagccaaaaacaggagggtcccaagggcctgggaaacgtggccagggaatgccagggggcaggtctgcatggctggtgggacttgggcccctggtccttgtcactggctcttgaaacactccctggaggaaggaaagcccatgggtcagagccccctgcagctgctgaaggggacagcgggagcggctgtcacctggcgggggctgggaggctgggggtccccgagctcttccccgacctgctctggatgctggagcccctgccctccttcccttccctgtgcctgtagagggtgtgcaatgctgacctcacgaaacaaagaagacacgcgggggcgggagacagagttgcccgcagcacagcggggaccccatctgccttgcgggtcagcccttttgttttacaataaattactcgtaactgtgcctgagcatgtttcctatagaaatgggtcaggacaggtggaatcgttggtagccgtgtctgacctaacactatactaagaccagcctccagccccagcccctcaccaacgctaagcatgaaaccaattttccgtctacctaggagcatgtgtttgatatcactgcacacccagggcacagagcttcggcattacaattcttggagcgtgtctgtctcctcgtgggtcctgtccagacctccagtcactcacagagaccctcacatgaccagcacccagggtccgactcccccagccaagcccagcgctgaccacaacctgcagccagcggcccccccagcccgtccaccagcccccccaccctgcccgtccaccggcctccccagcctgtccatcagcctccccggcctgtccaccagcccccccaccaccctgcccgtccaccagcccccctcccggggcagcactcagttgcgttcctttcgaatccatcgtttacacctctgtgtgttcctaatgcgcaagtcagctttacctctgctgctctcactggcaaggcaggctgctgggcagcttccagcaggcgagcctccttgtgccatcttgtctcaggcctgcaaacactaggggccccctagctgtgtggctcctctcccgccaggcagaggcggctccagggcacacacccacggtgctgggggagggccccacaggcagtgatgagcctctcacaggccccagcgaggtcgccgcttctgtgcttcccacggggtccccactcatgccctgcatacaggaggtgctggatccgtgtggatctggatcccctgagagtggctgggggatgagggtccctgtgtggaagctccacaaagccccacctgcctccacgcaggagctcagccttgcacaggagactaccctaacctaaccccaaccctaactcagtcagtcccgccggtggggtctgggccgatgcctgggctggtcaaaggtcaggccctcacgtggaccaggtgacgtgcttttgcatgaacctgttgacgttcctgctggactttgaaagggaccagggaagggaaagtgaggggaggcagcctgggtctgttccaggtggggcagcgggtaaggcccagcaggagccctggcaggacacgcctttcagccgagagaactccaccttcgaaggcggctggggcaagggttcgtggccaggctgccctgcctctcgggtgcctgcacccctgctaggaaaagtccctaggtagggcggcaactccagccctgcctctcccagctcccagtgcagcccacacgccggagtgcagatgacctgcagggaactcccatgagggaactctgtaaagcgaccttcagacgtgctatttatagatgtctatagatttatagatgtgtgtttctccaaacaaataaaccaccagaaagtgtcacagcaggacacgtcaccaaccccggggaccccatgttaccaggggtcctcctggagcctggagtctgggcctgctgaggacctggcttgcagacgggctccggccttctcgtcccattgccccaagcgctccaaccccctgtgaacatgcctctagtcatccctgggccctgcacagccacaggcagccacccggtcattcccatactctcaccatggtcctgcctccacgtggaagaccctgccagccgcagagtgcaggtgtggggacactgtcactgctgggaggcacgtcaccaaccccgaggtgctgctgaggctcagggatggtcccacattggcgcaggctgcgggtgccgtgtcctgaggtctgggttccccactccaggcagccgctatgctcagtacaagtccagtcccttctgttggaaaccccaccccaccctgtcagggctgagtgcaaggggagggaacccacacctgagaccttttgtggcccctcactaacaccccctttcctgctgtgacccctcagggctgctcagatgggcttggagacaggctcgggccccatctcccatcatacgtccagcattctagattagctggaagtccgacggggtctccctgggttaaaatcaaggggtgggtcagggtggtcccttctggaggctccaggcggaatctgtccctctccgtctccagcgtccagaggcatccgcatccctcggctcatggcccctctgccatctccccaccactgccccccagctgcttccctcatctccctgactccccctcctctctccctctcctggagaccctgtgatggcatcaagggcccccctgggtgacccaggacacatgccccagctcagcacccgaggcttcatcccatctgcatagtctctttgccatgtcaggttctgggatgaggacgtgacatctttggggactggtagccgaccacagaacccccacccccagtgcggtgggagacccaggccacctgcagacccctgcatggaggtgaggttcacacaaggagaccccagggggcctgggtccggctccctcaccccacgctccacgatgccagctcagccacccaccttggaaccgtgcagatggacagcagggagggtcggggctgctgggggctcccccactgctctccgcaccaccccgccgaccgtgtccgggaggggatgccctgctgctctccccaggctgctctggggagtcctgccctcacctggagcctggaggccatctgagtctgtttcacaaatgcttccagggactgcccctgccatgtgttaggggtgggaattctgggcacacagccaaaggtcacagatccccagagagccccgacagcgctgcgtccaccccacctgcccacccaggtgctggctctgccacccgtctgtgtcctgagtcagccctgactcggcagagagctgcaccctgagccagacctcagcagctgggtcctggaggcccccaagggccagctgcacgcacctggcttcatgccaagctcctcccgcctggcagtggctgcatctgcctcccctccaccctgagtgtcccaagtctgcccgctgtgcattccatggggccagcagctcggtggagcctctgctctcgggggctacagctgctcctagatgcctctgccaccgagggtggaccctgcagtgctggctcctagcctccctgccgattgcttcctgaagacctggggccctgggctgcagtggttggggagaggggggtgggagtgagaagctggcactgtccgtctttctggcctcatcctctccatggtctcagcccctggcggcctggactgcaccgttccggagatgctgcctccccaccaagtccctttagcccaactgtggtggcggccgctgcttctcacacgcgggtcctctcactgcctctccccggtcctcccttcctcccagcaccttcaccagctccccactgagtgccctccaatgttggcgaccctgacccttgtccagccaggggtgaagggcggcaagggatgggctggagggtactaggagcaggtggcggtgcccttcctgtcggtccacacccggcaagtggcgggaaaggtgtggaatgagtcagccgtggaggggagccctgggcctggaagacccctgtctttggcttgagaatgactttgaagggctcagggggtagggagctggggggagaccgggaggagagcggcaggtctggctctaccccgaggcttcaggctgcggaccatgcgtggccccagctctgtctgggcagcaggtgtcagcgactttgggttgctgtgggaatttgctccgtttatcagaagaaaacgcaccctggcaacacaggcccctctcaggtcaccaggcacatctggtcacatctgagtctcagataaacaaccaatgatgtcctggtgaaagcttgtcccgtgggacactcgggacacacttatattaaaacacgattaacgatctcaaactcagatgttactgggtatcctgcgtttttgttggcagctctgccactctgcccgtctgcctgagtcctctcctgccatcctcctgaccagaggcgtgggcttgagttgaatgccacgcagtggctaaaaatcagagagagggcaggcggcagggcgcggccccagggaaagtggccaggtgggcggtgactggccgggcagctccgtgtgtggcacagggagacctggcacagggagaccaggtacagggagacgaggcgcacggagcctcaaaacttctagagtgggccgggcgcggtggcgcatgcctgcaatcccagcactttgggaggctgaggcaggtggatcacctgaggtcgggagtttgagaccagtctgaacaacgtggtgaaaccccgtctctactaaaaatacaaaaaaattagccgggcgtggtggtgcacgcctgtaatcccagttacttgggaggctgaggcaggagaatcgcttgaaccagggaggtggaggttgtggtgagccaagatctggccactacattccagcctgggcaacaagagcgaaactccgtctcaaaccaaacaaaacaaaaaacaaacttctagagcgggaaaagatggaggcggcaatcagatttctctcaaaccacgaacacaggggtcggtatctgaggcgccggcaccagacacggcagggtctgagtgctccctgacaagcgatgatgcgcaggcttggagccatgccagtgacacgcctaggaaagttcacgcaccgcccagcacgcctgcgcatgcctgttcccgctccctggtgccccgggcgcctgcctgtcccggctcccatgggtgctgggtgtgtggaagctccggccccctcgggctgggttcattggggtcctcctgtgtggtcagtggactctgtacccccacagcacctgaggggtggctgacactgctttcccagctgctgcaggggctcagggaacacaggtgaccccacgtctctaccgagaatgagcacaccaacacctctcagaagacagctgcagcctgcagaggccatggaccccacccaggcccacggtgtggacggctctgccctggtctctgctgagccaggcccagaggggaccccaggtgagcagcaaagccccccaggcctggggctagaccgggctaacccttcctgctcagcacctgttcacctgtcccctctgctggtggcctcctgtcctcccgctctgggctcagcagcagccccgtggagaggccctgccaccacccccgccctgctggagacaggcctcctacgcgggctcctgcagccggtcgccctgggcctcctagaagccggggatcctctgctgaccaccggcagaaaacgtgcttctcaagctgcaggtgattcaccagtagtgggcaaggaactgaatgtggtgattactgcggagtcagcaaaacccgcgtgagaacgggcagctgagggcctgccgggtgagggaagcctcacggttcctgtttcatgagtttgctgtgagtgcacacgaggctgtggctgtggagtgtgcaacagtccacgcgtgcctgcgtgtgctcatgtgcgtgtgtccaccagcttgtgtgcacgcatatgagcgagtgcgttttgctcccagcttggtcgcagcgacggcgcagggaaccccgggtgaggccgaggaccgggaagggaggagggggctccgacccatcggacttaggggagccccgggtccgagacgccgcctctgtcccttcaagagtcgagcctggcgcacagggcagggacgcgggtccccacaccggccggcagctcgttcccgcccatactcgggtacgcccgctgcgaccccgcccgcctggcctgcgacgcacgctcagggccagcggggggtgacggtcccagaggcagaggcgccgcagccccagagtccccatccctgcgcggaccggcaaccccagtgcaccaagaggccctaacaccgagcccccagcaccgagtccccagcaccgggccctcagcaccgagtccccagcaccgagtccccagcaccgagtccccagcaccgagcccgcccctctggttcccccgcccgcccctctccgcgcctcaccgggtccgctcctggacgcgctcctctgggatgcagcttctccgcgccccggagccccaggaaaatgaaagacacgagagggaggggccagggaggaggcggcggacccgcgcgggacccacctcccagatgaggaaggagctgggtttacgggaagcctccaagtttcgggaaccacccgcgttcacaacaagcgtgacggtgaatttattattttcacgggaggcaccgcacccgcggttcacgctaaaggaagcaggaaagccgccgggagcatttttccaggagagttcgtgcctgggcgggtccagctcgcgtgcggcgcgcgttccccgcggggctgtttggctccgctcctggaggcctcgagtctgtgcacggggcgagctgggcgggccgagtgggccgcggggagggagggcggggggcggcccccagatgcctgggagtgcgcgggcagagtgagctggacccccggagggtcagaggccctttcataaaagcgcgcagagcagaggagtgatgtcccccagctcccccgcagagggtcctgcacctgcggcctgggccttcaggcgtcctgcggcccctgcggaggtgctggcctggccagcccgggaggaggggcccagcctgttggggcaggagattggggtgcgggtagaaggctccaagacgcatccgggccgggaacccacagacatcccaggtgggcaggaggtggctcgaggaggcctggaggacccggcgcctggcggggtggcaggcgggccacgtcctccactagaacccgagggggcacgcgggcaggtgcgggcggggtcaaggatgaccaggtatcttcgggacactaggaggaggccccacaggctgcagtcacgtgagtgggcaagtccccaccgggcagatgatgggggacactggggcgtgggcaatgcccccagtttcatggaagagaggaagaagcagaaccaaactccgggaaaccctcaaatgtggggaatggacggagcagggccagactggacgctgaaccttggagcctgcagctcagccatcagacccagggtccagaggtgggtggcacagaacaaagtcccccgggatgttccaaaagagaaactgtcgccaaattggcaggtgaaacacagcctgtcatcctcccagcaagacggcaccatggccggggcacagaggtcagattccccagcccccgccctcggggaaaccccagccaccctggctgccagtgagatgctggagagggggctgaaatcccacctgcccacgtcctctgcacagaggggcttgtccccgaggccacatcccccagcagccacagcttccttctccttttttcctgcctactagatctctcaactcagagggggctgcagttcctgggggcaggggggtccggctgcttaggcaggagcacctgcaccgtgaggctctggagggcagctgaaggctggcaggcttttgtcccgtgaggggacaccactgggggttggaggaaaacgcatatcctgataaagcatttcatgttgtgaaagtgaaactagtttgtttattttggaagtaatacaggcacagaaacaaaatagaatgaaaccaactgttgccttttcctccccaccctggcttcaattcccaggttgagttatggacactgccttacctatccttctagaagttttcctggtccatacaaacagcacagccatccactcacgtttatttctttcttttttttgagacggagtctctgttgcccaggctggagtgcagtgctgcagtctcgatcactgcaacctctgcctcccaggttcaactgattctcccacctcagccttctgagtagttgggattgcaggcatgtatcaccacgcccagctaatttttgtagttttagtagaaataggatttcatcatgttggccaagctggtctcgaactcctgacctcaggtggtccgcctgccttggcctcccaaagtgctggggttacaggtgtgagccaccacatctgggcagtatctttccatttcttttttttgttttgagacggagtctcgctctgtcgcccaggctggagtgcagtggcgcaatctcggctcactgcaagctctgcctcctgggttcacaccattctcctgcctcagcctcctgagtagctgggactacaggcgcccgccaccacgcccagctaatttttctgtatttttagtagagacggggtttcaccgtgttagccaggatggtctggatctcctgaccttgtgatccgcccatcttggcctcccaaagtgctggattacaggcgtgagccactgcacccggccgtatctttccatttctatacaatgctgggatcaggcatcttagagcggatgtgtggattcattcaccctcagcctgtccttgaatcacagcctctgctgtgccaggtgacatgtggagtttcatttcctttctgttcgaggaatttgtagatttcagttatgattttctgtttaactctccaaattattcggcagcatattcttaaaatccccaaggtcctggagcatttgcttttcttttttttggagacagagtcttgctctgtcgcccaggctggagtgcagtggtgcgatttcggctcactgcaacctccgcctccctagttcaagcgattctcctacctcagcctcctgagtagctggaactacaggcacgtgccgccacgcccagcttttatttatttatttattttatttttggtagagacgggtttcactatgttagccaggctttttttttcttgaactcctgagctcaggcaatccacccgcctcggcctcccaaagtgctgggattacaggcgtgagccactgtgctggcggcatttgcttttctttgtaacttgattctctgggttcccttgcctttcatccttgcccacccacgtgactgcagcctgtggggcttcctcctaatgtcccgaagataactcgtcatccttgaccccgccgccacctcgggttctagtggaggatgtggcccgcctgccacccccacaggcaccgggtcctccaggcctccttgacccacttccaacccacctgggatgtctgcgcgttaccagcccagatgcctcttggagccttccacctgcaccccatctcctgtcccaacaggctgggcccctcctcccgggctggccaagccagtacctccgcaggggccgcaggtgcagcaccctctgtgggggagctagggggatcgctcctctgctctgcgcacttttatgaaagggcctctgaccctcccactgtcctgctcactctgcccgcgcacccccggccacctgggggccgccccccaaagccctcggcccgtggacagactcgcagcctcctgggagccgagccaaccggccccacagatttgtgcatgactcagttgtacccactgctcactggctggaagggtctcacgggtccttccaacatgtaatattctctgactgttgggagcaagggtctctgcaggtgtccctcctgtcaaggtgtcagtggggtaggttaggtcttttatatacttgtcaattttttttttttaagacggagtctcgctctgtcgcccaggctggagtgcagtggcacgatctcagctcactgcaagctccgcctctcgggttcacgccattctcctgcctcagcctccccagcagctgggactacaggcgcccgccaccacgcccagctaattttttgtatttttatatacttgtcaatttgtatgggcttgagctatcagtaattaagagagataggttggaatggcctcctatggtgggggcttagcagcctcttcttgtggttctaggaatttttaatcatatatttggaggctttttttttttaagagatggggtctcctgtagttgaccaggctggcttgcagtggctgttcactggcaggatcgtagctcaatgtaccctgaccttctgggctcaagcgatcctccagcctcagctttctgagtagctggcaccacaggcaggcaccacagataaaaagtctaaaatgtttgcttcagtctttgtcgttttgttgctcttgttcttgtcttgtgctaacctaattctaatttatctattttataatattcggaagttttaaaatatgaggctaattttaaattcttacccagcatgtgtttctgcttttggtggaatccacaacccagcttgttattttccacctgaaaaggctgtgctcctcgaacatccagttatgttgccctgagccccttcacttgccaatcttcttggtatttcttttgggatttcactgtctttatagcttcactttattttaattctatttatttatttatttgggggggatggagtctcactatgttgcccaggctggagtgcaatggcacgatctcacctcacgcaacctccaccacccgggttcaagtaattctcctgcctcaatctccctagtagctgagattagaggcgtgcacctggctaatttttgtatttttagtagagacggggttttgccgtgttggccaggctggtctctaactcctgacctcataatctacccaccttggcctcccaaagtgctgggattacaggcgtgagccaccgtgcccagctgttatagcttaattttagaaagaatggcatttttagggctgggtgcgatggctcatgcctgtaatcctagcactctgggaggctgaagtgagacaatctcttgaggccaggaatttgagaccagcttggacaacacagtgagacccatcttcacaaaaataaaataatgagccgggcgtggtggccagtgcctgtagccccagctacttgggaggctgaggtaggaggatctcttgagcctgggaggtcgaggctgcattgaaccgagatcaggccactgcactgtagcctgagcaacagagcgagaccctgcctcaaagagagagagagagagagagaaagagagaaagagaaaatacttttaatagtaatccttcctagccaatgagataggaatgctgggtggtcataggagaaatgagaaatatcaaacagtaatcttgcagaaaagcaagaaagcagctgttagaatgagccacagaaagcaactgttagaatgagccacggaaagcagctgttagaatgagccatggaaagcagctgttagaatgagccacggaaagcagctgttagaatgagccacaaaggcagggatgagcccggactgatgagaccctcgaccccacaagcaggagaggctacgttggaggaggctggccggatccaccgtggcactaggcttgacctgtgcccaccccagacctaattgcacactgactgccattcacaatcacgtacacaccagcgtcacggcagatccaaccatgcccatatttagtataaaaatatctggcaccccaattctaagaaatcgtcacctttttcctagaaaatctaatgattattccaccctctaactaggaaagcccataaaatagaaactcaggcctcgttgtgtgtgactcactctcggagcacgcccgtgcctctcctgtgcgcaggcattcacttcacaataaaagcttcttgccttttgtctcattcctactcatcccgaattcttcctcatgatggtgtcaagaacctggacaccggctggcactggggctggcatctcgccggcatctgcagacccttctcagtcctccggccacagagctgctgctttccgtctgacttaagcgtcatggccgtgcctgtcccggccaggaatcctgtcaatggccgtgcccagccctgcttgctctgcggagccctggactcaggggagcctccaatgtgcccccaggacggtgctccgtgcaggaggagtggtctgaccacattctactctctccccttggctgcctgccccttgattcctggaattcccagagaatcaggacgctgttcccgggaagactctaaccaccagcaaatgcccaggtccgagggtgcccaaggtcgcaggtcctggatctgaagcttcctggagatgcctcctccagcctcatggggagaggagggagggttcccaaagacacccaagagtgaggatctggttctgggctgctggagaggagacgcctctgggagacccccccagagtccctgtgcccccaaaagccctgcccccaacccctcccccagtgcttctctgtgccctctcaccagtgcctcccccagtgtcctctccccccagtgccctcccccagtgccctcccctggtatcctctcccccgtgccctcccccagtgccctctaccttgccctcccccaagtgccctcccctggtgtcctctccccctctgccctcccccagtaccctcccccatgccctcccccaatgccctctcccccagtgccctccccccagtgccttcttcccctgtgccctccccccatgtccttcccccacaccctcttcccctgtgtcctccctctgtgccctcttcccctgtgccctccccagtgccctcccctgtgttcttccccagtgccctcttccccatgccctccccctgtgccctccccccagtgccttcttcccctgtgccctccccccatgtccttcccccacaccctcttcccgtgtcctccctctgtgcctcttcccctgtaccctcccccagtgccctccccagcttcctcacacccagttcccccatgctgagaggctgtcagtgatggaggtttggggtggcattagaccacctcccaggaagggcgaggaagcatttctgtaacatcagaatgcggcagcagaacttccctgaggagccgctgcccagaagagcttccccctgacggtctttctaggatgagattgtcccgcacctgcctccccatctcctgtctcggttaaatccctctccgagggcatgggaatgatagttgtctttgttcagcgtatccgagattttttttttttttttttgagacagagtctggctctgtcacccaggctggagtgcagtggcgtgatctcggctcactgcaacctccacttcctgggttcacaccattctcttgcctcagcctcccgagtcgctggaactacaggcgcccgccaccacgcccggctaattttttgtatttttagtagagacggggtttcaccgtgttagccaggatggtctcaatctcctgaccttgtgatctgcccgcctcggcttcccaaagtgctgggattacaggcatgagccaccacgcctggccaagaaaaatggattcttattgcactgatgcaaccaactgtatcaccataagagtactcacaaatagtttccaaattctagaggaaccagggagagaaacaaacatgctccaaattttgttcacaggagagtaccttgctcaattattaaaggccgtgaacagttcaagtttctttgactctgaaaaacaaaacaaggatcagcaatattctaaaaggtgctttctgagggccgtccatttagttcacttttttttttgagatggagtctcgctctgtcccccaggctggagtgcagtggtgtgacctcagctcactgcaagctccacctcctgggttcacaccattctccagcctcagcttcctcagcctgtagctgggactacaggcgcccgtcaccatgcccggctaattttttgtattttcagtacagatggggtttcaccgtgttagccaggatggtctcaatctcctgacctcatgatccacccaccttggcctcccaaagtgctgggattaaaggcgtgagccaccacgcctggcctagttaactcttgttttgcttgagattcatgaacatttcagttctttgtgagtcctgtatgtttttcctctattcaaaaaaaaaaaaaaaaaaaaagggccagacatggtggctcacacctgtaatcccagcactttgggaggctcaggtgggcagatcacttgaaatcaagagtttgagaccagcctggccaacatggtaaaacaccatctctactaaaaatacaaaaattagccaggcgtggtggtgcacacctgtaatcccagctacttgggaggctgaggcaggagaatcacttgaacccaggaggctgcagtgagctgtgactgtgccactgcactccagcctgggcaacagggcgagactctgtctcaaaaacgttccagggcctaatcttgagatagacagaccaaccctggaaactcagcggcaaaattccagaggtttcccccaggcagcaagtcagccacccagccgttgatcagatgaccccagcctgcgctccaagtgtactgggacccaagatagccactgaggacagacacacagaccttgtacccagcacggcgccggcacgcctcccacgccagcttccccgtgacaagcccctgccttctccctaggaatttgaagtggttgctttggacgggaatgcggccccttgcccatgactagtttcggataataaagtcactttctttcaaccaggcctccctcttgattactggactctgcaagtggtgaggaacggaacttgcgttcggttacaattttggtggcccgtgtggggaacgttgtgtgctttggggggcccaagcctgcccatctggtttctgttgggcagggcgtaggttcacctgtgagttccagctgctcctggctgctgcgcctgtggctggaatgggaggagctgccccgtggccgccgagatgctttcgtccgggaatcctgtccttctcttcctgctgccttcaacgctttgctggtgcaaaggaagtgacctttggagaagttaataaactttggaactgggtgccttagttggagttcacccagggaccctctgcctctttggggtgtggctgaggccctcctctgtttagacttggctgtgagtgacaccagttgggcatttgatacatttgaattcgtttgtgtttgtggcaccctagggcctctgctcagtgcgggttcagtcgcccgaggggccgtttgaaaccgagccccttaaaggaggttttttggacgcagctgttggtttgtgcgcatgagtgtgtgcaccctgacctctctctccttcctccaacgtcctcctcccgtccgccaccaaagcgttattcctcttggtcaaaagcacccttagctccctgtggctgcgaacagctgaccttgacaggtgatctgcggaggtgggagggattcatcccacaccgcgcaggtctggggtgcggaggctttccctgatgggagatgatcaagggtgagggggtgctggccccgcaccacgcagtggctggaggctcgccagcctccctccttcctttcttgtttctcctccctgctgcaaacctttctcctccgctttcctttcttttctattttcctgttcaatccaggggcccagcccaaaaagggaaaaacagtttccaacatcccggcccctgattttgtcgtcctcttagggactccagctggttacatattacagcccattgtgcatgttttaagctgacgggcaaatgacagcgaggaaaattcagacctccagtggtgaacctgtgctgtggttaagcagtgttctaaggtgctctctggtcctctcttttctttcttgctttaaacctgctgttactaagctgctggtgcgaagactcgttatttacggtctaactagaatgtaaacgttggaaactcatttgaaactaaagagaaagagggtaaaacaattttttttgtttcgttttgtcttgttttataaaaccaaactgccacagagattgctttacccaaattttggttcaagttctctccttggatgacctatcaggcgacaagggttagccaggtaagcaggttccagtctgtcagaacagccacctgcagccagctggctcctataggcccatgagtttgtgacactttaccattgccatgccaacacccagatgttactgcccctttccatggcaatgacccagaagtaccaccccttttctaggaaattctgaatgccccacctcttaatttgcatgtagttaaaagtgggtataaatgtgacggctgccctgccctgagctgctgctctccgcacacttctccggggcagccctgctctgtatcatggagctgtgacatgccaccgccttagtgaagctgctttcaagggagaagaaaaggaaaaattagttgggcagacagctaaagctggtctttggtaaaattcttttttttttttttttttttttgagacggagtctcactctgtcacccaggctggagtgtagtggtgtgatctcagctcactgtaacctccacctcctaggttcaagcgattctcctgcctcagcctcttgagtagctgggattacaggcacccaccaccatgcccagctaaattttgtatttttagtggagacagggaggcagggggggcgggggtgggtcttgccatgttggccaggctggtctcgaactcctgaccttaggtgatcctcccgccctggcctccgacagtgctgagattacaggcgtgagccatggcacctggccttaaattgtttttaaccacagctaatacggtacacctttcagagacggagcactccacatcacaggtggcaagagtcttgattcttcctcagccccaggtggctcttcctttattgtgctcctgtggatccttcagactatgtagctaaaagcaaagaaaaacacgtattctatctgcccctcccctttgacacagaaggaggcacgaccatcacggcgtcctgagctcagcctggcccacaccaggccctcctggagaccctcctggtgggtgcggggtggcctcccaggcatggctgctgtgttgggtggggggtgactaagtcaacagccccgtgtgtgtgtgcgtaggctgattctggccttcggcagtcacagtcccacagacaccatggtgcctgtgtcggctccgtgcctgtgtcagctcaccgtgcctgtgtcagctccgtgcctgtgtcagctcatggcgcctgtgtcggctccgtgcctccagcggtgtttgtctttagggcaaatacccactccgccctgggctgccacatctcacaatggggaagtggggaaggggggtttgcaggggtggttgcagggtgagggtgtgtctggctgcacagatttacacgcccgtgggctgggtgggagtgcggtaggccaggtctcactaacgtgggcctccatgaccagtttcagtactgagggagttaaaagccagtgcccttatacaaaggctggaatgtaacagaagcataccaagagttttgcctagccctttcctgggccttaaagcatgaaaaaataacaaaggaattcttaataggacccatttaggataaaacaaattttatcgcgggtctgaaggaactcctcaggcctccacaaacaagcttattgggggcccgaaggaacttctccaacctccgtgacttagcaggagacaggataagggtaatgacccagcacctggacccatctagattaaacttactgaggctccagaggaaggtcttcaggactcagacctcagttacagattagaagttagtcacttagtcttcagatgaatgcacacttacacgtagacgtagcgtgtggaaggtagataagctctggaggactgtaattttgagttggtctggagataatgtccaggccttctccctgtaaccggttggggaaataaacacgtgcttcctccccagttcagctgcgtctcgttatggggcccgaccctcagtttggtccgggaacgggggctgcctctcgtccgaggacctgctgctactcctggtcgtggctgcagctctgtccgcctttctgtccggctttccatccggggtgccagctcgccgctgtccccacatctggctcccgtgttcccggctgtcacgcagggtcacgtcgtccccaaagttctgctaacacgaatgaagtctcgttggtgtgacatcaaacagctacgaaggccgtttctgtgacccggaggccacacgccgagtctccgggacgaagcctcgcttggcagagccgccggggcctggtctctgtgttctgtgccacagatgccacacgactgtttcccactccctgtgtttacgtgggacccaaagataactgttttcccgaaattaatataattcctaagataatttttcatgaaattggaaaaactggttctaaaattcatacgaaggccggtgtggtggctcccgcctgtaaatcccagcactgtgggaggccgaggcgggcggatcacgaggtcaggagatcaagaccatcctggctaacacggtgaaaccccgtctccactaaaaaaatacaaaaaattagccaggtgtggtgacgggcgcctgtagtcccagctactcaggtaactgaggcaggagactggcgtgaacccgggaggcggagcttgcagtgagccgagatcgcgccactgcactccagcctgggcgacagagcaagactctgtctcaagaaaaaaaataaaaataaaaaataaaattcgtacgaaagagcaaagagggccgggcgtggcagctcacgcctgtaaccccagcactttgtgtcacgtgcgtccatgtgaagagacaccaacaggctttgtgtgagcaacaaggctgtttattcacttgggtgcaagtgggctgagtccgaaaagagtcagcaaagagaggtaggggtggggccgttttataggactggggtaaacagtggaaagttacagtgaaaggtggttacctattgtcagcagaggagggggtcacaaggtacatggtggggagatcataagactcattgtccggaagaagaatgtcacgaggtcgatcgatcaggtgggacagggcaggaacaggtcatcatggaatgtcgtaaggttggtcaatcagttaagacaggagctggctgtttcattcttttgtagatttgggttgccccagacttcttggctcttgcaggccatctggacatacatgtgcaggtcacaggggttacaatggctgagcttcggctcagaggcctgacacacctgacacaagggagcgtgtgtctgagggcgcagcagccaaggagcggcttcccctccccaggagggctccgagggggaagtcaggaagctgtttcttgcacacgcgagtgtgaagctgcaaactgctcagcggcaggttcgggtttaaaaactcaaaacttaaaaaaattagctagccgccacagtgtggggggaagaaccactctgcttttaaatacaagagatggcacaagatttcgggatagtgcccatgtgggcgaccccgacccggtccccgccctgcttgtgccaaggatcctcaggcacccggggcttcctgtttatacagcagaacgccctctctctggagacagagagacagaagggtcccagcctgaacacccccctctggagacagagagactgagggggtcccagcctgaacgccccctctctggagacagactgagggggtcccagcctgaacgccccctctctggagacagactgagggggtcccagcctgaacgccccctctctggagacagagagacagaggggtcccagcctgaacgccccctctctggagacagactgagggggtcccagcctgaacgcccccctctggagacaggctgagggggtcccagcctgaacgccccctctctggagacagagagactgagggggtcccagcctgaacgccccctctctggagacagagagactgaggggtcccagcctgaacgccccctctctggagacagactgagggggtcccagcctgaacgccccctctctggagacagactgagggggtcccagcctgaacgccccctctctggagacagagagacagaggggtcccagcctgaacgcccccctctggagacaggctgagggggtcccagcctgaacgccccctctctggagacagagagactgagggggtcccagcctgaacgccccctctctggagacagagagactgagggggtcccagcctgaacgccccctctctggagacagagagacagaggggtcccagcctgaacgcccccctctggagacaggctgagggggtcccagcctgaacgccccctctctggagacagactgagggggtcccagcctgaacgccccctctctggagacagagagactgaggggtcccagcctgaacgcccccctctggagacagagagactgagggggtcccagcctgaacgccctctctccgggctcttccaccagagctaagaccttctgattttcttgtcttgtcttttgagacagggttttgctcttgtcacccaggctggagtgcaatggtgcgttcttggctcactgcaacctccgcctcccaggctcaagtgattctcctgactcagcctcctgagtagctgggattacaggtgcctgccaccacgcccgcctaatttttgtattttagtagggacgaggtttcaccgtgttggccaggctgatcttgaactcttgacctcaggtgatccccacacctcggcctcccaaagttctgggattacaggcgtgagccactgcacccagccaatgccttctggtttttctgatttttctgatctctcattttcctttctagaagggaggcctcttgtcatcctatctctacccgcagaaaataggatttgagtttctatttgagtgctgggaccagcgttggagggagggaagacatcagagccagagcccctccaagactgccccccagggcctggggctgcagggggctggccctgctgggaaggagaggctgccaggtggggtcctgggccaaggtcccagcataaacacccacgaaaccccctgggctggccggctgccaccctgccctgctcctcgcctcatagctttccacgagaccccctgggctggccggctgccaccctgccctgctcgcctcatagctttccttcacctctctctccttcacaaactcacccagccccacgtctgacacacatttctaaatctatcttccttgtcaataattcaaccaacgcttttatttgtcaaagagaaacctgccatagtgggaatttacagccacagtccccacgacgtaaatgtttccctctcacatttggaaacctgctgtgttggaattgaatagtaaataggagaattataataaatgaaataagccagccgtccctgaaatacgattgctcctcaggacttgaggctgatctgagccaattcttccactgatctctacgcagagcctcgggaactcctagaggagcataagttccaaactggagacgcacatgcaggggcatagaagcctcactctgaacaactaaacaaaagcatctgattttagaatttaaaaatgtctgtggggggtgcctcagttccccccgtgaccccagctctggtagggtcactgccacccgcgcgtgcatgtcctgggatcctgacctctccttcaaacccaccagagcgatgccaggtgactctggggaggctcacctgctcaggtgagtagaatcaaccctgtcggccactggagccactggggtagccggggccgtggagctctgcacagcccgggggaggccgatgttcagaacaaagcttttatcatggaaaagtacaaacataaacacaaaggtggagactgggacagtaatctgttcactcactgccttctcctgacctcttccacttcctcgtctttcccggccccctcccagccagaagggtgggaaagcgctggttttaattagcgatttcttgactgcctccccctcattcctgagcctctcccagtttcctgacggtagaaaacactctggctttgatttgtaagcagatgtgtagatagttttcttagaaagtttcccaattgtaaaatgattgcaacttggttaacgccgtctgagacacaacagttctgtttccccaaaccctcgctttaaaggagtttttacttcatttatcacgtatgctactgagagaacgaacggtgttgaggtcgccttcgggtttcctgggttttctggagctgtggaatcgagtcccaagtgtcccgagaggcagacgtctggagtccagagctgtgagcggcagcagaccctgcagcttcagtgagggccgcacacagggcatctgcgcaagacacgtcacccttcacatggccccatggccacagggacagcgtgtcactttcccaggttatttggtatttttaaaagctcaaatgttaaagagtcggctttttaggttgtgccagaatgactctggggtcaaactatttcttttttttctttttattttttttgagacagagtctcactcttcacccaggctggagtgcagtggtgtgatctcagctcactgcaacctctgcctcccatgctcaagctattttcctgcctcagcctccagagtagctgggattacaggcgtgcaccaccacgcccagctgatttttatatttttagtagagatggggtttcaccatgttggccaggctggtcttgaactcctggcctcaggtgatccgcctgccttggcctccataagtgctgggattccaggcgtgcgccaccgccccctgccgaaactatttcaatgtgacaccagcatcatgtgtggcatctgcaggcctctctcgggttcccctctgcacggagcctgtggttttcagggcgagatgcccggctggccccggggcctgaaccagctgcaacggaaggctctgtgggatgagggcaacctttggcctggggtgcaggggccccggactctgatgctgcacctcgactttacccaggtcccagggcctgcacaggctgagccccccactagcatgactgctcctggagctgtttgttacagagacttgccgcctgactcagggccccactgtggcaatgtcacctgccacaccagcagaggtgtctgtgggggttgatgctgacagacactggtctgttcttgggggaggatctgatttgtcacaaaaagaggtcaagtaggctgacagttcttgccgatggcccaggtgtcgggattacgtgtcagtcctggctgcgctgccggcttctctgcgcctccctgggtgatgcccatctcaccggggtggcggcaggtgcaccatcgtggggccggcacacccggcacctcggaggcctctgtcccagccactgggcctgtccaggagggctggacgggccaccacctcggcccaccctcgaggcttctccagggctcgatccaggctgggcttcagacatggagttgctggcagcccgagaatgttacaattgttgagcttcttatttccaggtaactcaagttcattttagaagctgtggaaaacacaggcaagcagagaacatgaatgacctgccccctgttatctaccccaaacctgacctcagtcagcatctgcttctaggtcctctcgctttgtagctcctgcctttggggccagctgcttcacaccccaagtccttctattattaactgactcttcctgtttacttcaatccagcagatgtgtgtagagcagcaaccacgccgggctgggaccccgcggccgaggcgtctgctggaaggagtctctgaggtcaccaaccacgccgggctggggccctgcgaccgaggcatctgcgggaaggagtctctgaggtcactcctgcccacaggtgcacgtctgtgcacccgcccactcctgcatacacacgaacacacctgtgcatgtatacaccgcaccccacacacccctgcacactcgtgagggcatgctctcacacacaaacatgcactcgcaataggcctccagggctggggccggccgtggagctggaccgagggagggagcttgctggggtggcccaggtatagcccctggcccggcctcagcccacccggcagactctcagctgaaggaggacgcgggttgccgtcgggatgccgtgtgcaacatcccaactccacagatcagaagatggaggcagagccgattggaggaggagggtcgggaggcctcaggaattgctaaagggccagccatggttctcagttcttcccagcaaccagtccagagaccaggccaatggcagggcccctttgcgggcttggctgatttgatggtacaaaagcacgagcgtccgtgcagactgaagtgaccaccagggggtgctattggcacacagcaagttggcgcccaaatccagagcctagaaattgatcctgctgcctccgggctgctctgccgcacccacaggtgcccagggatgccaggcgcctgccccaagccatgtgggggtggcacaggtgcacccggaagcccccagtttccataatcttccctccctgccaggaggcgtgtgggttcgccaagtcctgcttccagtgcctgcttctccagtctcagatctcagcgagcacaccaggggtatgggaggcctcacacccaggggctgttgcagccacgccgcttcctgtgtgtgggcgctgtgcatggcagggtggacacgacaccacctcccagttgtcatgggcagagcccctttccttggacagaacccctggtgcccacccctaggaggtaggatccagaccagtgggcagaggagggggaggccatgctcctttggggccatttgtgtgcctggcggtggcccccattgtgtccccaagtggggtttatggtgttgccgagggctgtggggggcacgcccagtatctggagcttctgggttgatttgagggttgttctgtgtgtccaggccatgtgggttgggccacggcctgtggctagggtctttatggagcaggattgagccacatgtggacagggtccctgtggagtaggattgaggccccctaatctcccagctcattctgcacaactttggttttgctctgatttaaaaatgaacagattaaactgaagtaaatatttcaagctgtttttaacaaaaaaaaggtgttattcatcatgcacagtgccctcactcagatgacagacagcaatgagcttggctctgcgggggcaggcagctggtggctgagggtgaggccagcatgacatggctctgatttacccaaaatgtttaatacttgccatttttttcttagtctcatttaatgtcttttttttttttttttttttttggagacagagtctcactctgttgcccaggctggagtgcagtggcgcaatctcggctcactgcaacctctacctcccgggttcaagcaattcttctgcctcagcctcccgtgtagctgggattacaggctcccatcaccatgcccagctaatttttgtatttttagtagagacggggtttcaccatgttggccaggctggtctcgaactcctgacctccggtgagccacctgccttggcctcccaaagtgctgggattacagacgtgagccaccgtgcggggctgtttaatgtctttttatggagatgcattttgtagggtgatgagagatgagagcagaaaacaaaatcaagcaccagggccccaggtatgcgtcttccacatttggtttatttgatgaaggagttcatggctaacagggccctatagcccaagtgtgacccagatctttagaactgcgggccctccctcaactccatctcacccagtagcatgaaccctaaatctactatggaggccttagggagagagggtgtaggagggtggctgcactctcataccttcctacatctgctggagcccagggcccccatcacaggcagcacctgctcctgtaggctacagacagggtcacgcaggcgcctggaaaccgctgccaactgccaggattgggtctgcacctgccccggcctccctggccctgggtgatggggggaagccaagaggggagagtcccagggaacgtgacccccaagtgtgtggctgccccgcccctcgcgggtgttcaaaggccaggagccctgggatattgggaggatgtttcagtatccccaaacctgaaggcacccagacttccagaaaaggctggcaatggagagacaggcagcttctttctaagctgcatcataccaggaggtcgccaggggcacagagctgcccaggggcagtgtttccacaggtttgggctatggaaatggggacttctggccatccttcctctctggccttcttccagcatctccctccaggagacaccagtcccctttccccatgggaccactcagagtcatgtccaagaccttccccaatggtggtctttgctgacatcttagggcagcccccacccttgccactgtggatgaagaaatctcctggggtggtgggggctctgcttcctggggtctcacgtggccgcctccaccccctcacttggtccccagctgcctggaaacccaccctagatggactcaagttatctgcagatgtgtttgacagaacagcaaggatgtacctgcagttttgaagaccctgggctgggcgggatcaccacctctgcctttttagggaagggacccacaattcccagcactcatttgctcttttgctgctcagggactgtcactgcacaggccctggggcctatggaggagtcacagactctggactcaggatggggccccaggccccaaccaggctctggcccagcccagggaagataataatgcccaccttatggaaatcccaccccaggagggttcaggacagaccccaggagtgttcaggacagagcccaggagtgttcaggacagagcccaggagggttcaggacagaccccaggagggttcaggacagaccccagaagggttcaggacagagcccaggagggttcaggacagaccccaggagggttcaggacagagctggccacagccgggtacagcgcccaggccctctctccttccttcctctcctgcaaccattcttcctacttgagagtaagatacagagaccttgctttttgcactctctggagaatgtgtgactggtgatgttctttcctcttatttgcttgcctgttttctaaatgtttgataatgaatttgtttactttgaaataagcaaacaataccaaaagttatttttaaaaggacagcctctaagtccatgattacaatttggatgatgagccagtgtggtcgagggtgttctgatcctcacacagcactggtgacagacctgaccagggcacgtggaggtgcttccacatggcagtggcttcttggtccttcagaaggatggaggccaccaatgggccacggagctgagtaggtggacaaagcaaatgagcaggaagggtgggctgggagtgaggggagggtgactgtggtcccctggatagtctgttgtaaagaagccacctcggctgggcacggtggctcatgcctgtcatcccagcactttgggaggccaaggcgggtggatcacgaggtcaagagattgagaccatcctggccaacatggtgaaaccccatctctactaaaaatacaaaaatcagctgggcatggtgacaggcacctgtaatctcagctacttgggagactgaggcaggagaatcacttgaacccgggaggtggaggttggcgtgagctgagatcgcgccattgcactccagcctgggcaacaaaagtgaaagtccatctcaaaaacaaacaaaagaaacaggcagcttctcagaacacatctgtcctccatgtccacgggcgcatcccacccctggccaccaccgtgtggcttttctccgtggaagcagaggccatgcatcactcccacaggcagcctctctctgacgagcctcagtagtaaattcatgcaagaaacaaagaaaactgctcctgtccttcttcagtgctgtgcggaggagcgagagggaaaagccaaccataacgccattgcatgtgctgctgaaatgctttgtgcaaacgttgagactggaggtgagggcggaactttgtaatataagagcagtaagataaatgttgattttaaaatccaagtacttggactttgctagaatattccataatcttttcctggtcttgattattaaacagttttcaagaaagttctatttggtgagtcacctgatgatctaaacacacttttctttcttgtttgattccagctgggtcacctgccaacagaaccaagcccacttgggttttggaggctttgggggctggctggtttccctgggcatgattggtgacctcaggtcagattcctggacttgctggggatcctgtgcccaggaaggcaccagcccaggaggctctgagcctcagccagggatgcagcaggttggtagcaccttggcagccatcccgaggacacaggtaagaagccaacagagaagcaagaatgtgtcttattaaagctgctccactccacaagcatctctggaatgttctctgggccccggatctgcgcgaggcattctgggtgagacagagacgaagccgcttgagctcggaagccggtgctcaaagagcgtgacgtggcctcaccccattcctctgcagggctcagctggcacctgcacccccgaggtagctgggggcccctgagcttggccaggcccatctggcagccttgtccctgcttgtccaccccctctgggttgcgttcagcttcctgagctccccctcttcacccgttcctaacacaagagcttgtgcaccccaggatggtggggatggggttctggctcgtgggcaatctgggtgtcaggcttacggccccagtggctccgggtcatggccttggccccacaatggctgtgctgccccatcagtggtctctgcagctggggaaatgcctggtccttctggagatacaggagtgttggattccccgattatggccacgtcctgttcctctggtaccatccacccaccaagtcttgccacggtttccctctgggcctcaaatccagctgtccatcccaacatctgtctcaagtggcctctcctgtacccagctgcccaggaagcgatccaaaggctccgtcccaggctgctgaggtgactgaggaccttgagagggtcctacactctcagaccagggtgaggccgaggcccgagaggcaagtccctgcccaggccctggctggccaggacgcgctggccacagcttcccagagtggacgctgccctgcacccgccaacacttccccgtcagcttcccggtcccacaccgctcctgctggcaacgaggtcgcagcatattaaattctcgacgcaactactgtgtgaaaaagccatgcaaaccagcgaggagcctgcttaccacaggggccctcagagggctctgctgctcctcggtcaaaacctcctttaggcagtgactctggcagctgccggctgggctgtgtcctgagaactgaggctgggaggggccaggtgggagggacctcatcctccaggcgcccactggcccagccctgagtgttcacgacaggtgcagggctccctccccggcccccttctggccagggcagccacagctcagccccgaggccttgagtggccttttcagagaaaaccaggacctgggggctcctcccgggagcctctgacccccagacccataaacaggcttctctgtggggtccctcaaccactactttcctctcacctgaggggaccagccagacagctcaggcacccgagtctttagggaatgagctcactgccctctccacccacagcaggacacctggcagccaaagccccacacctgcccctatcccaggactgggacgaggaagccccagggtgaggggtggccctgatctgagccctaacctggtgggggtggcaggcagccccaggtgtgtggatgacctgagccaggcacagacagctgccaggtggggaggagcagaggtcatggggatgtagggaaagggtttgggggttcctcccacagggccactgtgtgagacaatttgtcactttcttacaaaactaaacacactctgaccacagcatccagcaatctcactccttagagtttaccaaaatgagttgagaacttatgtctacagacacctgcacatgaatatttgtagtagctttattcataattgcccaaacctgggagcaaccaagatgtctttccataggtgaatggataaataaaccatggtacatccagacaatggaataccattcagtgttaaaaaataagtgagctggccatgcaaggtggctcacgtctgtaatcccagcactgtgggaggcagaggcaggcggatcacttgagcccaagtgtttgataccagtgtgggcaacatggtgaggccctgtctcacaaaaaatacaaaacttatcggggtgtgcaccagcacctgtagtcccagctatttgggaggctgaggtgagaaaatcacaggagcccaggaggttgaggctgtagtagctgtgatttcaccagtgcattccagcctgggtgacagagcaagactctgtctcaaaaaaaaaaaaaaaaaaaaaaagaagtgaactatcaaaccacaaaagacatggaagaaccaaagtgcgtattactaaaaaagaagttgaaaaggctacataatgtatgagtccagctctgtgacattttggaaaaggcaaaattaaggagacagtcaaaagattcctggttgccaggggctgggagagggagtgatgaaaatgcagaacacagatgaatcggggcggagaaacccgtctgtacaatattagagtggtgggtctgcatgattatacatgtgtccaaacctgcagaatgcacagcaccggaggaaagcataatggaaactgcagagggcgatgatgataataacaacgtgtaacaaatggctgggacgggaggactggggaaggctgtgcacctgcaggagcaggggagcggtgggagagctccatgcttttggctcaattttgctatgaacctaaaactgctgtaaaaaatagagtctactgaaaaaacaagtgttaatttataagcgtcttgtttaaagagcgaagagatgaaccacaaaggggaaaatgtgtttaaacaataactaattgacaattggctggttcttaaaattcagagaactttaagacagagacagcaaagcagggatcacgttttacaaacgcggcaggaccaggacgtcgtgcccacgacgggccagcaaccacaggctggatgctcaccctgtgccagcctgcagacggagagcacccaccccaatctccagcccccagaggagctgcctctccagggccttcctgcaggtgcccaggggctgcacatggccctccttggagggagctggtgactcagcactttcatttcctggaaactgaggctcatgggagatatgcagatgagcccagagcaccatgggaaatggccctttatatacccaaatgggctctgcctcctcctttccctgggtgcccacatgaacagagacaccaggatggtgagatctcccgaggaggggtctctgaggaggggtctcggagacacggcctggtgctgggtgaggggttgggaggctgaagcggggccaggattcctcaggttccctcagtttccctcaaatttccctcagtttccctcaggttccctaaggttctccaagttccctcaaatttccctcagtttccctcaggttccctcagtttccctcaagtttccctcagtttccctcaggttccctcagtttccctcaggttccctcagtttccctcaagtttccctcagtttccctcaggttccctcagtttccctcaagtttccctcaggttcccccagtttccctcaagtttccctcagcttccctcaggttcccccagtttccctcaggttccctcagtttccctcaagtttccctcagtttcccccagtttccctcaaatttccctcagtttccctcaggttccctcagtttcccccagcttccctcaggttccctcagtttccctcaagttcccctcagtttcccccagtttccctcaggttcccccagtttccctcaagttcccctcaggttcccccagtttccctcaagtttccctcgggttcccccagtttccctcaggttcccccagtttccctcagtttccctcaagtttccctcaggttcccccagtttccctcaggttccctcagtttccctcaagtttccctcaggttcccccagtttccctcaggttccctcaggttcccccagtttcccccaggttcccccagtttcccccagtttccctcaagtttccctcaggttcccccagtttccctcaggttccctcagtttccctcaagtttccctcaggttcccccagtttccctcaggttccctcagtttccctcaggttcccccagtttcccccaggttcccccagtttcccccagtttccctcaagtttccctcaggttcccccagtttccctcaggttccctcaggttcccccagtttcccccagtttccctcaggttcccccagtttccctcaggttccctcagtttccctcaggttcccccagtttccctcagtttcccccagtttccctcaagtttccctcaggttcccccagtttccctcaggttccctcagtttccctcaggttcccccagtttccctcaggttccctcaagtttccctcaggttcccccagtttccctcaggttccctcaggttccctcagtttccctcaggttcccccagtttccctcagtttcccccagtttccctcaagtttccctcaggttcccccagtttccctcaggttcccccagtttccctcaggttccctcagtttccctcaggttcccccagtttccctcaggttccctcgggttccctcaagtttccctcaggttcccccagtttccctcaggttccctcagtttccctcaagtttccctcaggttcccccagtttccctcaggttcccccagtttccctcaagtttccctcaggttcccccagtttccctcaggttcccccagtttccctcaggttccctcagtttcccccagtttccctcaggttcccccagtttccctcaggttccctcagtttcccccagtttccctcaagtttccctcaggttcccccagtttccctcaggttccctcagtttccctcaggttcccccagtttccctcaggttccctcagttttccccagtttccctcaggttccctcagtttccctcaggttccctcagtttcccccagtttccctcaggttcccccagtttccctcagtttccctcaggtttcctcaagttgcctcagtttccttcaggttccctcaatttccatcaggtcccctcaggctctgccagtttccctcaggttcccccagtttccctcaggttccctcagtttcccccagtttccctcaggttcccccagtttcccccagtttccctcaagtttccctcaggttcccccagtttccctcagtttcccccagtttccctcaggttcccccagtttccctcagtttcccttaggtttcctcaagttgcctcagtttccttcaggttccctcaatttccatcaggtcccctcaggctctgccagtttccctcaggttcccccagtttccctcaggttccctcagtttcccccagtttccctcaggttccctcagtttcccccagtttctctcaggttcccccagtttccctcagtttcccccagtttccctcaggttcccccagtttccctcaggttccctcaggttcccccagtttccttcaggttccctcaatttccatcaggtcccctcaggctctgccagtttccctcatgttcccccaggttctgtcaggtgaagctgatgggctgttggggtccctgaggtgtagggggtggctgatgagcccggggaggtcggatggaggaactgaaggcctcccagccccggtgctgttcaaactgagcagggtccccactaaagggccagtctgaaccccaacatccctgcccctgctggtccccacagtttgcccccaccctgcctgctgggggtgcctaacctcccttcctttgcctttccagctctcctgagaccacagcaactgcagaagctgaagacatttccagaagttcaagcttccaccctctgcaggtccccactgagctgggacccaggtcatccaccccaccccaaatccctggataggaaacccctttctcctcctgctccttgtccccttcatccctgccgcccagcatcctactggcctcagcacctgtggccagaccgtccaagatcctctgaaggcccagctcttgctgtccaccccggcagtaggcaggcagcctggccatgtgccctccggtcagcatgcggtatgaggaagagggcatgtcctacctctacgcctcctggatgtatcagcttcaacatggagatcagctaagcatttgcttcacctgcttcaaggctgcctttctagactttaaagacttgctggagtcagaggactgggaagaagacaactgggaccctgagctgatggagcacactgaggcagagtcagagcaggaggggtcctcagggatggagctgagctgggggcagagcccaggacagcctgtgcaggggggctctgaggcatgggggccagggaccctggcagcagccccagaagggttggaagatgcaggtctggacccccactttgtccccactgaactatggcctcaggaggctgtgcccctgggcctgggccttgaggatgctgactggacccagggtcttccctggagatttgaggagcttcttacctgctcacactggccaagcttctttccttcatagcaggggtttctcaaagtggacctgcccccaggggagcccgtggtgttgaagctgggcattacctgggcagtggaccctgccgaggctgaggcctagttactggccctgcagcttgtctccatggtgggctgctatgataccatctacctacagaagatgaccccagacagggccctgaggaccccagggcagcactggaaattgctgctggagcctggtgaagtgtgggtggtgagactccaagatgcaccccaagagcaggacctgcactggtggatgctgagcattctagaaacatcgttaacaggacacagggcagagctggtccctgcagcctcagccctgcagaagaggattcaccatagtctcttattcaccctggaccaacagggagagcaagaagggagactcagcctgtaagccacagtcctccagccaagaacaggatctcagcacccctgagacacagagcaggggtcctgaggaaagcctggctgttgcaggagcctcggccatgggggagctgccctgtttccagcctcagtccagggccccagaactgagagactaaggctcatgtagctgccattgtcctgggcacaccaggacatcagagactgggaagggccagcaattgctgttccacaacagccaggggagcagttggcaaaggaaacatggggagcaactttaggggctgggagatagggcctgttgtggcctcagagggaagcattacaaatattcataacctggaaacaagttcttaccagttgattgtcacatagttctggatgtgttggcctgaatggctgttgtgctgcttgtgacatggggggcagggcacagaacttgtgcctatttcaccttggccatggggagggacattgcttgtaaaacacatgctctgcagaacacaccagaatctgtggtgacctggatgtgttctcgactttgccaggacaatctcaggggtgccacaagaccctgtcagcagcactaggatctctggtctacagtggagggagagctggttttaaatgttggccgttgatgcaatttaaccatttaattcctgttgctctatatgttgtttttaattttaaaaagtcataaaagctttcaaacaagctcctgtgtaagtcattcctcagcaagttttgttgattggccttatccttgtcctctcagtatctgggctaagccactttgctggcttgaaatcccaccaaatggtgggaacagaggatagaagggaagaggagcacgggagagatgagggttctggtcggtttccaggctcatcatgggagtttgtttcacattatttataaagaaatacagggccaggcacagtggcacatgcctataaccccagcattttgggattaggtcagcccaggaattcgaaaccagcctcggcatcatagtgagatttcatctctactaacaataaaaaaagttagctgggtgtggtggcatgcacatgtagtcccatctactcaggaggctgaggcaggaggattgcttgagtccaggaggtcaagaccgcagtgagctgtgattgtaccactgcacttcagcctgggcgacagagcaagaccctgtatcaaaaaataaaataggccaggcgaggtggcacatgcctgtaatcccggcactttgggaggccgaggcgggtggatcacgagctcaggggtttgagaccaacctgggcaacgtggcaaaacactatctctacaaaaaatacaaaaatgatccaggcgtggtggtgtgtgcctgtagtcccagctacttggaaggctgaggtgggaggattgcttgagcctgggagttcacgctgcagtgagccaagatcatgccattacactccagcctgggcaacagtgagaccctatatcaaaaaataaaaataaataaataaaaatacatacttaaagaacagccatgttttgaacaataaaaatgtgttgtcaaacatataattaatatagatatgtgccccaaaattttttttaagtctatagaccaaaccacatgtaaaggttgctaatgttggccaggcacggtggctcacgcctgtaatcccagcactttgggaggccgaggtgggtggatcacgaggtcaggaagtcgagaccatcctggccaacatggtgaaatcccgtctctactaaaaatacaaaaattagctgggcgtggtggcgcgtgcctgtaatcccagccacttggaaggctgaggcaagagaatcgcttgaacctgggaggcggaggttgcagtgagccaagatcgtgccattgaactccatcctaggtgagagagtgagactccatctaaaaaaaaaaaaagtttgctaatgttgaggagacagatgatgccaatgatgatgatggctatgacggtggtgatggttatagtggtggtggtaataatggtgatggagatagtgaagatagtaaagaaggcccacaggaagagacctgaaggataaagggctctgcctccttggatttggctgctgctgaggcccctccattagtttcagcattggggccctccgctgctgtcagacacggatgtggatgatagtccttcaagaaggaggtggggcccctgacctccttgcctcccaggaaggcaggaagaagtggaatgagcacgctgagaaggaaggaacccccacactctgttacatgacacggggtgaggagtttggccccatggcgtggtacacacgtgtgcctttggttgtatgcttgcaagagaaatctggggcctctggggtttctgccctcaccccagccctgactctgacctttggaatccctggaggggctttctagagctctgcatccagcctcttcactcaggacgtgaggtttcctgaatcctgaactggaaccttttcccaaaggttagccagctttcaagtggcctcatggggccagggaggctgtagtgttgggactcccagggggcccccaaaagttgattctgagaaaagactattatgtacactagacatttctcctcactctccctatgtctgagctttcacgagcttggacactttaagtcaggggaagtgctcggaattccatgttgtctcctgccagcttaagccctttcatcccctgcaattgctcagatgtctgaggctctctgctaattaatagggccaccaccagctggagacccgtgcaggttctaattggtttgattcatgttaccatctctccagctgtgtctcatatctggaggtgtttgagaccaagactggggaaattgtggtgcctgaggtcaaaagtaaaggaaaataccaacagcagcatcaagggaagtgtctcctggaagagtaaagtgaaatcaccagctgcagaggtgctctgggagaggtgggaggccctgcaggggtgtccccctgggacctccttccaaaagaaagagccctcagctctgggtaatgaagtgggcccacgctccctgggcaggatcccaggcagctgatggctgatggctgagctctagttggggctttgagggcctggccgtttctgcacggcccagtctttgctcctcatgaggttccctaactccatctggggtgcactcagcctgagctgcctccacccctcacttttattcccttatttatttttatttttattttctttttatagagacagggtctcactatgttgctcgggctggccttgaactcctgggctcaagcgatcctcccacctcagcctcccaaagtgttaggattacagatatgagccactgcgctcggccacgttcccttattttcatcaagcatctctgccccagtgtctgcggcaggatgggcctctggtctctaagcacctgagaggtggagtgggttctgaacaaagcatcctcttcaagtctgaaaaacacaaacatcaggctggatgggcacctgaaaagagccccatgaaaccagctctgtctgtggaacctcattttctacagaatttagtaatccaattggaaagtacttctttcacaaaaattatcattgcaaaacataatgaacccattaagtgcagagcaaagcttcaaaagtcacatttgtggaaaatgggagctttatgattatgatttatgatttaatggtccataaagtgaatcataggcaggcagagccactttgcactaaagcgctgggattacaggtgtgagccaccgcgcccggcctgaaatgtgaattcttacacaacaacaaagagctttccaactgtgtaatttcactcacccttctccagagacctggtgctattgttgtcttggatattagttgacacgtgttatcatcatcatgcgccaccagagctattgctgcatagtcctcatctttttaatttacaaacatatttaccttcctggtgcacttcatttttccatgcacttccgagtttctatctggggtcattttctgtcagcagaaggaaagcctgaggagctcctttagtatttttttgtgctgtgacaaatgttcttagctttgtctgaaagtatctatattttattgtacataaattgttggttaaaattctttattttggtactttaaagaggtcattctctttcggtttccatggttttctgaggagatctagtcatctttcctattgttattccctgaatgcattgtcttttttttttttttaatctcaataatttttacagtttctgtttacctttggtttttggaattttttactacaatgcgctggagttgtttgcttttagttttttcctgcttgtgatttactaagattctaatgtctgtaagttgacattgcttatcaattttgaaaatttcagccactgccttttcagatattgctcctgccccattttcctctgttgttgatctggggactccagtgacatgtacgtcagatcatttgatggtgtggttccacaggcttttctgtttttcattcttttctctttctgtgtctggataatttctattgacctacctttaagttaactgattctttcttctgctgtgatttctgaattttagatactgtacttttaaaagttataaaatgtccatttgacccttgtgagaaagaaactcatccgtccaaatccaaagaactgactcagggacctggagaacagcgaaagcgaggcttttaatgacggcaagatcgggtgtctggtgggcaggcacacccagcagtttcaacaagcaatttatcccctagtgcacagatccctcccccggttcctcataggctgagtactctggggtcacagtcttcccgcatgtcgcctattggttgttgggcaggggctgtagggcacaggtccctccccagcttcctcataggctgagtactaggggatcacagtcttcctgcatgtcgcctattggttgttgggcaggggctgcagggtgcaggtccctccccaggttcctcataggctgagtactctcgggtcacaatcttcccggatgtcgcctattggttgttgggcaggtgctgtaggtgttttcttcagggttgtcctgctgcattttgttgcagcccacaatgcattgcaatcctagttagctcaggggctctttaagtatttgacttatgacctaagtagctgggcaggctgataagaatagatcaaaccagctattttgcaggctagtaaaatttcatcttaaacttctttgatttgggtgagggcaactaagagggggttaaaagggagtggatgaggccgacaagcaggcatccactatccaagctggggcctagtatatcctgttcttctgtagtttgctgacctaagccgattcaaggcacactgtcttggaaatggaccactgtatacattatttccttcaccctttaaaaaatttttttagaaatagaaatggagggtctcattatgtgcccaggctggtctcaaacttctagactcgagtgatcatcctgcctcagttttcaaaagtactgggattggccgggtgcggtggctcatgcctgtaatcctagcactttgggaggccgaggtgggcagatcacgaggtcaggagttcaagaccagcctggccaagatagtgaaagcccatctctactaaaaatacaaaaattaggctgagagcggtggtgggcacctgtaatcccagcactttgggaggccgaggcgggcggatcacgaggtcaggagatcgagaccatcctggctaacacagtgaaaccccgtctctactaaaaatacaaaaaattagccaggcacggtggtgggcacctgtagtcccagctactcgggaggctgaggcaggagaatggcatgaacccgggaggcagagcttgcagtgagccgagattgcgccactgcactccagcctgggcgaccagcgagactctgtctcaaaaaaaaaaaaaaaaatacaaaaattagttgggtgtggtggtgggcacctgtaatcccagtcactcgggaggctgaggcagagaattgcttgaacctgggaggcggaggttgcagtgagtcaagatcacgccactgcactccagcctgggcgacagagtgagactccatctcaaaaaaaaaaaaaaaaaaaaaagtgctgggattacaggtgttagccacagtgcccagcctgggaatttctaataaaagagtcaaatggggttgggcgtagtggctgggcaacatggtgaaacttgtctctacaaaaaatacaaaaattagccaagtgtagtgtagcggtgcatgtctgtagtcccagctactcgggaggtaggagaattgcttgagtgtaggaagtcaaagaaagctgcggtgagccatgatcacacccctgcactccagcctgggcgagcctaggctagaccttagagcgagaccctgtctcaaataaagaaagaaatacattcccattttctggtgaaaatttccatcttttcatgcatgttgcccaggttcttctgcttgctttactatatttgtaacagtttttgtaaaacagaaactcctggtctgctaattccaatacttgtgtcacatatggacctgcttctatcggctatttttcccccatcaattatggatcacataagatatgaagcagcaaggaaacaataatcagattattatttccttgctgaagcattttatacatagcaactgtcaaagtccaaatatacagacaaatctttaagtttaatgtttaattttaggaagaatttcaattcggtatgttcaagaacaaaagaaaatcgggattcttttggaaagagaaacgttatctattgctttgaaagaaagcccgttggcactggtagttcgggggagctggcaagctcaggcgagtggcctcagtggtaaaaccagcactggaggccaggcacggtggctcacgcctgtaatcctagcactttgggaggctgaggtgggcagatcacctgagctcaggagttcgagacctacccggccaacatgatgaaaccccgtctactacaaacacaaaaattagctgggtgtggtggcgggtgcctgtaatcccagctacttgggaggctgaggcaggagaattgcttgagcctgggaggtggaggttgcagtgagccgaggttgcagtgagccgagatcgcaccactgcactccagcccgggtgaaagagtgagaccccatctcaaaaaaataaataaataaataataaaaaaataaaataaaaaataaaaaacccggtgttcgtgtcagggcaggtcgtttcagcagctactcggtgaactggctgaggtgacagcagatcgtttcggcagctggcttgcgggaaatttaattcttggagcaggcattctgggtcctgagtgcttttccccagccctagcccctagactccagcttagtaatcagctctcacagaaccatcacgtcggaggcagccttccaccccctttcctcccgcgcacaggcaggatgagctgctcccctttcgggtcggaagctgcagctgtatttggtttcagttcggctgttttcagctcacagagaatgaactgtcttattgtgtgacccttgctccgtccagcggacgctcggagaccagagggacttttcccgccctctccagcccagcctcgcctccccagcacgtggcaaacgtcccacggaggggactggtgggcatctggggctcccccggatccagctgattgcaggagcctctcggccattcacacttggccacctcctctcccccagcagaaccccttcagctttaggggccggtccgcggcctcaggcagcagatgagccccgggcggagtggagtgggcgaggccagctcctcgctgggggccctttagaccccgtgttcacagctctccagctctcctctagtctaatttattaatgttctgtgtctttttctttcaggggttcagcatgagtgaaggcccacatcctacctccgagcagcaagtgaaaccgagtgggggccagcacccagctcaggggctcgagggtgaggctgtggggtccttcctcctaccccgcggggccctgcagctcccagcgtcacttccgtggatgtggccaccacgagtccctgccgaggcctggagaggctgcgtgggcttctaagagcatctgtgggagacccgcaacaggggcggggtcaaggcccccaaagagcccgtccccgcctgggcgggtgactccctccctcccttacctcctttctatgaccctctcggggtttaggggtgttcctgccccccacctgcgcgcgggcgggtccagggcttggtggacacggagaatcccaggctccgtgccctgcaaacacgggcgtgaggggcgcaggggtgaacgctggaggcggagaacccaagaggggctgcggggtcagccttggggcagccgggctggaggcagcttcgctccgcagacgcagacgcgagacccgcctgggaccctccgccgaccccgctgcggccccgcgacccccgcgtcttcccggcgccgcgcggtcagcgccgccccctagacacccggcgccgtcccctccgcgcgcctgctgcccgctggggttattttaataccgggccctggcgcggggcgcggcgcattcccagctggcggcgggcaggtggcggcggcgcagagacccggcgcggggcggggggcgcggctttggtggcgggactggcgggcgcccctgccgtgtgctctggaagccgaggccaccgcggagcccctcgcgccccctctgcgctgggacaggggagcgcgcctcggaaagttccccgcggccccgctgcgcgaggagtttggagccgcgagcggctgcccccacgcgcgaccccaggctcggcgggcaggtctggccgctcagtgaccggaggcaggtgggtcctcggtgggtgaccgggagcgcgcggggactgccgggtctgtgcccttcggggccctccgcagggctgggccggggtttcgcggtgggaacccaccctgggcgaggggagcggggtccagcgaggcggcttctcccgtgccgtggaactttcggcccctccccttcccccctagcgaccctggagcaatcctagcggcccggcggccgctgtccccctgcccgtgactcgggctcgcgcacaactggggagcccggtgcaccctcggcttctgcgccgtcccctgggtgagggctctggaaatgccctgggtgggggcagcaagggggtgagggtcccctggacagatggagctgggagctgctcggcctggtgggaaagggcggacagggcacatttccaggccctggaaggcccccagcgcccccacctgttgacaactccccaccccagccaagactgctccctgcgcagccatgagtgttcggcctaaattcagcgtggctcgtggaatcaggcagcctcctgtgtcttgtttcttcagcccaccaccgcgctgtttcatccaggctgctgaccccagcggcgactccttcactggcttcatgtcacagtttgcctgccccgtccactggggacatttgagctgtttccagcttcttaggagtcaagctgccgtgaactttcgcacgcttgtcattttctgaacgttggcagccctttatctaaggtactaacctgagagtagaattgccgggtgagaaggtataggcggtcaactctgcaaatcgtgccaatggctttccaaagcggcggcacagtccaggttcccagcaacaggaaacggcagggccagctcctccacagcccccacgcctgttgacaaggatatctgccttttcacgcgttcatccttgtcagcacgcaggggctcctgtggccctgactggcatttccctgcttgttggctgcgtgggtgtccttttcaggaagtccccggtcacggttttggtctctttttttcaaatgggttgtttgtcttttccttactaatttgcagttcttccctatatttttcttaccagctttttgtctatgtttcttctttttttttttctctgagacaaagtctcactttgttgcccaggctggagtgcggtggcacaatctcaatcttggctcactgcaacttccacctcccgagttcaaacaattctcctgcctcagcctcccgagcagctgggattacaggcgtgtgccaccatgcccgactaatttttgtatttttagtagagacggggtttcgagatgttggccaggccggtttcgaactcctgacctcaggtgatccacttgcctaggcctcctaaagtgctgggattacaggcgtgagccactgcaactggcctgatatatgttttctgatgatctcctagcctgtggcttatgatttcgctctcttggtaaagttcttaattttaatgaaacccatttgcttagtcttttattgaaagtattttttgttcatttttaagaaatattttcccatccaaggttatgccagtattcccgttttcttccagaacctcgactgactgatttaacctttcacacttaggcctgcaatccatcttgaattcgtttccctgtatgagaaatggagattgcagaggccttcctctccttacatgttcttctatttggacttttaaagtcagtagctactagttttgcaatctaaagaaaacatttttttaaatgtacaagtcaaataaatacgagaaaggactcaggagtaagtgggccccacctgtgcacagacaagaaagtgaggcctgggggggcgcaatgggcagagcccaggactcccagttctgtccactgccgacctctgccccaggggctgccctcctgtgttccggctttcagaaaagcccagttcatcccagaggccatgggacctacagtgaggggggggcaggggtcctgctggggcatgcgggggtcggggaggggggttggggcagctcgtctggtggctcttgagtcctcctgcagagctggtggcttccagagagtcccgagagttggagggcactggggagcccacgtgactctgtgggaacgaggccatcacagtggcctcctgggagcggaaggtgttgcctgatttgcttctttccccacaggctgagctggttgcccacaggggcccccgccccatctcagggagtgtccacccagccctgagcccgtcgtgaggggtcagagatggcgctgacccccgagtccccgagcagcttccctgggctggccgccactggcagctctgtgccggagccgcctggcggccccaacgcaaccctcaacagctcctgggccagcccgaccgagcccagctccctggaggacctggtggccacgggcaccattgggactctgctgtcggccatgggcgtggtgggcgtggtgggcaacgcctacacgctggtggtcacctgccgctccctgcgtgcggtggcctccatgtacgtctacgtggtcaacctggcgctggccgacctgctgtacctgctcagcatccccttcatcgtggccacctacgtcaccaaggagtggcacttcggggacgtgggctgccgcgtgctcttcggcctggacttcctgaccatgcacgccagcatcttcacgctgaccgtcatgagcagcgagcgctacgctgcggtgctgcggccgctggacaccgtgcagcgccccaagggctaccgcaagctgctggcgctgggcacctggctgctggcgctgctgctgacgctgcccgtgatgctggccatgcggctggtgcgccggggtcccaagagcctgtgcctgcccgcctggggcccgcgcgcccaccgcgcctacctgacgctgctcttcgccaccagcatcgcggggcccgggctgctcatcgggctgctctacgcgcgcctggcccgcgcctaccgccgctcgcagcgcgcctccttcaagcgggcccggcggccgggggcgcgcgcgctgcgcctggtgctgggcatcgtgctgctcttctgggcctgcttcctgcccttctggctgtggcagctgctcgcccagtaccaccaggccccgctggcgccgcggacggcgcgcatcgtcaactacctgaccacctgcctcacctacggcaacagctgcgccaaccccttcctctacacgctgctcaccaggaactaccgcgaccacctgcgcggccgcgtgcggggcccgggcagcgggggaggccgggggcccgttccctccctgcagccccgcgcccgcttccagcgctgttcgggccgctccctgtcttcctgcagcccacagcccactgacagcctcgtgctggccccagcggccccggcccgacctgcgcccgagggtcccagggccccggcgtgagcacgcggaggggcggctggagtccaggcggggacgcgccccaaagccccagccactcccgggagcccccccaactcccaaatcacaggccctgcccctcctccgtccccttctggaaagatcctgctcgcttcccctcagcgcccttcccgtgatgcccagaagcgcccacccgcctccctgagggtctccaggaggctccagcgcagtcccggcttctggagaccatggcttcgtcacagagggcagcaggcgccagtgcccggcccgtgtggagaccatggcgcggctgccgcccccgggaccctcctcctctcagccagcggccctgtgactcctgttcctgcctgtgtggctccatcccttgtggctttgccactggaacaatcaaccctgagctggcttccgtgtcctgcctaggcgcgggggacgccacatctgaggtgtgggaggatcggccggcaggatccccaggacgacaacggcagctcaagggggagcctgtgggtctggctggggtagagggtgcacctgcctttgaggcctgtgcaggcggctggtctggcacctgatgtggggcagggaaggtggccaggaggggaggctccagctgaggggtggagcagggaaggcactgcccagcagaggcctgaggctttgggtgcagaacgcaagaggacaaggtcagtggccgcacctacaggcctcctggcctctcatccacgtctggctcaggtctgatcagaaagggaatccaggtcccacctcacagtagcattggcagtctctgccccactcacccctcactgcctcctggacagacttcctgccccagctcccagcttggccaaccatcctctctctggcgactgcccccctccagcccccagcccggccccggaccctgcatggcctcccccagcctggcctcccctccccaccccatggccatgcccagactaccagccccttggggctccatctgaacactggggcaagggtcatgcccgcttggtccctccagtgcctacccctcagtggagtgagcacagctctgctggcaggactgtggccggcgtcaggaataagcatgcagcgctctccccagggcctcccggaagaggggcaatgcttgcagctcccccctggagttacgaaagtgctctggaactagacgctggtgactgggcgatgctgtgaacgagccagtgccacagaactgtgcacctgaatgtgtgagttctgtcgtgttttactttaaaaacaaaaggatcccactccccgaccttgtccctctgttaaaattgaaagagactgatgtcagccgccccgtctgggagggaggtgggggggtcagccccccgcccggccagccaccccgtccgggaggtgaggggcgcctctgcccggccacccctactgggaagtgaggagcccctctgcccggccaccaccccgtctgggaggtgtgcccagcagctcattgagaacgggccatgatgacaatggcggttttgtggaatagaaaggcaggaaaggtggggaaaagattgagaaatcggatggttgccgtgtctgtgtagaaagaagtagacatgggagacttttcattttgttctgtactaagaaaaattcttctgccttgggatcctgttgatctatgaccttacccccaaccctgtgctctctgaaacatgtgctgtgtccactcagggttgaatggattaagggcggtgcaagatgtgctttgttaaacagatgcttgaaggcagcacgctcgttaggagtcatcaccactccctaatctcaagtacccagggacacaaacactgcggaaggccgcagggtcctctgcctaggaaaaccagagacctttgttcacttgtttatctgctgaccttccctccactattgtcctatgaccctgccaaatccccctctgcgagaaacacccaagaatgatcaataaaaaaaaaaaaaaagagagactgatgtacatcccactcctgaatacatgtaaaatgtatacaaaaatatcttctatgaaaatggtttgtaatctgtagattgtaatccgggatttgtaatctgtagattgtaatcttggagatgtcttagatgtaaaatcccatcttcgggttgggggttttttgctttctccaaataaatctgatctttaaaattcaaaaaaaaaaaaaaaaagaaagaaagaaaagaaggccaggcacgatggctcatatgcctataatcccagcactttgggaggctgaggcgggtgtatcacaagttcaggagttcaagaccagcctgtccaagatggtgaaaccccatctctactaaaaatacaacaaaattagccaggcgcagtggcaggtgcctgcaatcccagctactcaggaggctgaagcaggagaatcgcttgaacctgggcagcagaggttgcaatgagctgagattgtgccattgcattccagcctgggcgacagagtgagaccctgtcttaaaaaaaaaaaaagaaagaaagaaagaaaagaaaaaaataaacagcgatttgctggtaaaatcacccggggagcaggcagctccgcggagggtgggacagggctgatgacgccccttccagaggctcccaggagccacccgagccatgcgtcctcgcaggggtgcacctgcctttgaggcctgtgctggcggctggtctcttgaggcatccttgcagcttctctgatgcagaaggagagctttgggggttggaggtgctttctctttctcaaccgaagcctgattcctaaagctgctgtctttgtagagaagcaaaatcaaaattaaacatctgacagccagagctggtccctggcttggtggttccagctggcactgtcctcgcctgacacgcagactctcggcggcagcccagacggcggggcacaggacgtggggagactccacgcttgacctcttgcccaccgccttccggtctgctcgcgccaacatggcttctgcgctgagcacctgcatgtggcacggggcccagggtggtgaccggcagtgactgcctcacagcagctgctcactgctcctggccccccgcttttccagcagaccccccacttctgtggaaggccccccacgtctccagagccacgaagctccaaaagagggaatttctggagcaacatggtcccatccatgaccccccgcctccaagtcagaacacagctgaagactcgagtcccaggaggggccctgcagccccacgacccagagaagaccaccccagagccaccctccacccaactcagcgggcgacctgctgtccccaaggggcggggagtgggtcccctcctcccacctgggtttggagagggcgggtagcccccatgatgtgaggcacagttgctggaggtgaccatgcaggcatctacaaccacgtgtgtcctccacggatgtcagcacggggccgatgaggacagaattccctggaaaggcagagcttcagggcagggctgggtaacgtgaagaaaagggtggcacgggcacgcgtgtgcatgtgagtgtgggctgcgggaaacccctggacaaaggagaaagcaaaacaaggggtgaatgactcagggacaggagagaaattaaataaaacctaagtaacaggggacaactgggtgcagtggctcacgcctgtaatcccagcactttgggaggccgaggcgggcggatcacgaggtcaggagatcgagaccatcctggctaacatggtgaaaccccgtctctactaaaaatacaaaaaattagccgggcgtggtggcgggcacctgtagtcccagctactctggaggctgaggcaggagaaaggtgtgaacccggaaggtggggcttgcagtgagccgagattgcgccactgcattccagcctgggcgacagagcgagactccatctcaaaaaaaaaaaaaaaaaaaaaaaaaaaaaaaaaaaaaaaaaatctaagtaacggactctgagaaaccggagcaggcagaggctgggaaaggaaacctggagacctgggcactaaaacaaagcactcgctgaaaggctggcagattgatccgcagttcctccgggaggagcacctggttccgggagggagtcccccagccctgatcccctctctcctttccaatgcctcttattaaagaaccgtgaagatgcagaggtgggcacacacagcacagtgcaccccagatcacaagcgggacgttctcttcggtgcccgcttcccctgcctgggtgtggatggggcagcagtgggcgccactgtgcaacccccagccccagccccggccccgtcctcatcaacacatcatccagtcaccatgcgccgtgcctgcgcatccccccgcccgctggcgaccccgcagcgcacctgccttccacccagggggcctccataagcaattacgtcagtgacaagtagctctgtaagctgcagcaccggccccctgcctcccagaacacacatggtcccacacaatactgcagactcacacccgctcacactcacaccactggactcacgcccactcacacaccactgcagacacacccactcacacaccactacagactcacacccactcacacaccactgcagactcacacccacacccacagctgggccctgccctgccaagcctccattgttgcagggtccccggagcccgtcaggcctggcggctgctctgtatctctctctctgcattctctcttctgcacatttcctaagcaccaaagggctctgccaagaaccctctggcagggggtgcagcccaggcagcgttctgtcccggggaaagggcactgaggacagcaccctcaaatccagatggaattttatatgtaaatgccgggtataaagtaataatgagtgaagaggaagtagcagtgaatgtattctaaaatgagaagcaggggccgggcgcggtggcgcacccttgtaatcccaacactttgggaggctgaggtgggtgaatcacttgaggtcaggagtttgagaccagcctggccaacatggtgaaaccctgtctctaccaaaacacaaaatacaaaaattagctgggcatggtggcgcacgcctgtaatcccaacactttgggaggctgaggcgggcagatcacctgaggtcaggactttgagaccagcctggccaacatggtgaaaccctgtctctactaaaaatacgaaaaaaattagccgggcgtggtggcgtgtgcctgtaatcccagctactcgggaggaggagggaagagaatcgcttgaacctgggaggcagaggttgcagtgagccaagatcacgccattgcattgcactccagcctgggcgacagagcaagactccgtctccaaaaaaaaaagcagcagaaaggttattgaaagattattgaaagtatgacctagacacggtgagaaatgtgatttcaggagtcagaattccgatgcagaaaggacaactcaacaccaaatgcagaaaccgcgcaggatggagcccctggctctgctgtgactctctctccagccatttcacttagaaaccgcgcaggacggagaacctggctctgctgtaactctctctccagccatttcacttctaggattttatctgaaattttaaaatcaggcgtggatcaagacatatgcacaaaggtgctcgcttcagcatcactttaaaaaccacaggcaccgcggaattttccacagttggtaaatagattatgacgtgagcagtggaggattttgtgtatcttcagagaatagcaaagctccgttccaaagtgtccttaatgatccaaggcatgacggccaatgaggaaagctggaaagtgaaaccgagtgacttaatccaggtttcgtttgaaacaaataagaatgtgtgtggatgtgtggtgagagtgtggcatttggagtgtggcttgtgagactgtgaccctgtgtcatgtgcacacatggctgtgtaggtgtgtggtgtgtgagactgcgaccctgtgtcgtgcacacgtggctgtgtaggagtgtggcatgtgtgtgactgggaccctgtgtcatgtgtacacgtggctgtgtaggagtgtggcatgtgtgtgactgggaccctgtgtcatgtgtacacgtggctgtgtaggagtgtggtgtgtgtgtgactgggaccctgtgtcatgtgcacacgtggctgtgtaggagtgtggcgtgtgtgtgactgggaccctgtgtcatgtgcacatgtggctgtgtaggagtgtggtgtgtgagactgcgaccctgtgtcatgtgcacacatggctgtgtaggcgtgtgtgggtgcatgtgtgtgcatgtatgcatcaagacttcacagggacactttaaaatagcaacagtgggccgggcacggtagctcacgcctgtaatctcagcacgttgggaggccaaggcgggtggatcacgaggtcaggagttcgagaccagcctagccaacatggtgaaaccccatctctactaaaaatacaaaaattagccaggtgcggtggcagacacctgtaaccccagctactcaggagtctgaggcaggagaatcacttgaacccgggaggcagagattgcagtgagctgagatcagaccactgcactccagcctgggcaacagggtgagactccatctcaaaaaaaaaaaaaaaaaaaaagcaacagtgttagcccttggtgggaaattttaggtagtttttttttgttttttgtttttttactttttatacttttgagtcttttccagatttctcccaaaaggtatacacagctttaaaatcaggattgttactaaatttttttaagatggggtcttgctctgttgcccaggctggagtgcagtggtgtgatctcggctcactgcagcctccgcctcccaggttcaggtgatcctcccacctcagcctcctgagcagctgggattacaggcacgcgccaccacacctggctaatttttgtattttttgtagagacgggggtctccctatgttgcccaggctggtctcaaactcctgggctcaagtgatccgcccacctcagcctcccaaagtgctgggattccaggcgtgagccaccacgcctggtctattaagaagtttgaatgtctgaagccttcatggttgcctcaaacgtagtcacgcctggggtcggtgagtgctgtgcgtctcctgcacacggggctgtcgggcgcctgccttggaggaggaggaggacatggcatgcgagaggcctgcagctggggaggtcagagctgggcccaggcctgcgtgttcatctacgcgttgccccccgtcccctgggccacccctggaggcccttctcctcctctcccctcctcccctcccaccccaggccctgcccttccctggcacccaactcccttactcagacctcatccggccccaccctgacccaggtgtgggggtcccggggctccaagccaccaggctgtgtggacagcccctcttctcagcagtcaccgtggccaccccagctgtgtccagggctggagtcagagcctgctcaggtaggagggacacggtgccaggggccggtcgggggcggcgacaatggagtgcatggcacaacccactagaggggtcgagtgccccgctggggatttcagcaaaagtcctttctgccctgaaagcaagagtaagaccccggctctaacaggtcctagttgacgttgtccatggctggctgcccccagcaccacagctctgctgtgcccacggccccgaccactgccaggctcccctggaccctccctgccatgtccctccaccccccacaatgccccccagaccctccccacaatccccgcaatgccccccaccccccgcaatgcccccggaccctccccacaatgccactcacttccccacaaggccccccacccccgctgcaaggcaccctgaacccccccccacgaggcgcatccctgctgcaggccgttggcaggtgttgctggttccagcattccttacaaatgggagcctgcagcctgcggtcctgcatgtccggactccagtagtttgcagcacagctgcctcccttctgctgccggggcctggccgagggatcgctgccgctgctaaggggtggctgtctgggtccagcgctgggtgggcagtcgctaaagaagttgctgtgaatgctgctgcctcagcctctgctttcgtttgccctgggtagaacccaggggcggaatcactgggcaggtggaagctgtctcgctgtctccctgttccccaaagcagcttcagccgtgccgcggacactcaccggcaagggacgagccctcctgtttcccccctgcaagcacctggaatttactggatattaggtgcacttgggaaaggaatttcttttcataaaaggcgactgaaaatccctttgtgagacactgactgtgctggatcagagattttgtaaatttgggtttggcctatggggtaaatggtagggcctgtgctggagaggcctttgctgtgtggggtgtgcagctcccctggaaggccctgggcagtggagcagcctggatggggccccccctgcatcaggataggggctcggttccagcactatcatatccccccaccatgcccacccctgctaccctccacccacacccccagctgcttcagcccagagcaaaaatggtgagggagaaggtgtcctgggcgggccttggtcccgagaacaaggcagcaggtggcccatgcctggggggcaaaggatcgcatgaatgaactgtgtccccggctggggggtggatgtctggtggcaggtgcctggcggcgggtgattggtttgccaggcgccctcacagactgccccacgtctggcctgtctccaggcggctctggcgtggctggggtttggtttctgatcgttgctccccgaccagagctgctgcagggcagtgggagtggacgccacgttccccaaactggcctcaagttcaaaggggctttttcagacacccccaggtcccaccttcccgccttcccaatagagcgtggaggacatggtcttctggggtccacggcggggagggtggggtgcaccggcgcgtggatgcaggggtctcaaggccccaagccacacttcacatgagttattcctcaacaaagaagcacctgccatttagagctgctgaactcccaggcattccaggaacagtgtgcttcaggaagtgggttgcacctccaaccagcaggctccgctgtttacctgcccgggcacgctccgctgtgggaggccatccccgtggaatggacctcaaggcggcccgccgctgcaggtggcagcagtgactgcgcttgtggggtgaggcggccctggccggggaggatggctggagctgcttggcaaagacttgcgctcttcctgccctgaacctgcacagcatcacaggtgcgctcctggccacctggagggtcagccccgggaggtggcgtggtgcacgggcccctttctgcccctaggaaagcacttggtgcaacccatgctgtctggcaccttccctcatcactcacaagggcaggtttttccatctgaattccagacagatgacagtcccagctggaagcgaggctgccaaggccaacggccaggctgttccagactccggcttttcccaggccaagtgcccagccccatgcaggggtcaggggaggccagttctcctgggactgacccagggcccagaggcgtcgcgtgccccaagccaccgggacaggtgcacaggctggcactggcccaaggctgggtagttctggtctgtcacttttgcccacctgcagccaaggagacccaggctgggagggcctggggggtgagtgaggtcacagcaggacacagccccaacggtcagcagcctggagactccggtccaagccccagccccctctgccctccccgcatggggcccctgcagaccccactgccagctaggcctgggatcttcctgtcacctccagccagcccaacgggacctcctggcaagcccccccccccacccccgcttccctgaagcccacagcaacccacaggccgagcggcctgggctgttgggtatttcatggccccgacgggagcccctttggcagagcccaccactgggctgctctccaaccgagtgctctcctgtttcacagctaagggacctcggctcgaaggaccacccaggctgtgcctggggcccagtgctggaaatcccgggagtggacacatgcaggtgcctgggactgacgggtcctcacagggcgttgggccgggctccgtccgtccaggtggcctccggcaccccacagcgcgattaaaaacacagagctgtgtctcaccccagaactaggagttggcgggaaactggagccgctgcccccctgcccttcagccaaatctggccaccctgagccaaaattcctcccgggggctgggagtcaggccggggctgggcctggggcctgacggggaggggctgtctctgtcccaggctctcctccccatcctccctccgtcttcccctggcctccagtgatggggaggggctgtctctgtcccaggctctcctcccccatcctgcctccgccttccccggcctccagtgatggggaggggctgtctctgtcccaggctctcctctctgtcctccctccgccttcccctggcctctagtgatggggagtggctgtctctgtcccaggctctcctctctgtcctccctccgtcttcccctggcctccagtgatggggaggggctgtctctgtcccaggctctcctccccgtcctccctccgccttcccctggcctgtagtgatggggagtggctgtctctgtcccaggctctcctctctgtcctccctccgccttcccctggcctctagtgatggggagtggctgtctctgtcctccctccgccttcccctggcctctagtgatggggaagggctgtctctgtcccaggctctcctccccatcctccctccgccttcccctgggcagctgggggccagaagccttctccctgggacgctaagaggcagtcccggggggtgtgggttcaggggtggagggaggggcccaaggagaggcaggagccagcgtacccacctcaccatgggcaggactccagggccagtgggcgagagcacgggaagggggctgggcggacagcgaggtagggatgccagcaagttctgacccgggctgaggggtctgggctcccctctgaggactgcatcctccagagccctgaacacggcgcggccacccagggagggcccagagcagggaggcggccacacacgccagccgaaatgaagatgcagggcaggactggctagcaggagggcctgggtgcggggtcccagggccgaggggcacgtggggacagtgagcctggcctggcctcacaaggggctacgggggaaggaaagcccaggtagggtctgtcaggggcccgagcacccaccctggtctccagccacagaccctccccggagcacccgccctggtctccagccacagaccctcccctgccctctaggcagggcatgctggcaggcggggtggggccagcccccaagggtgagccgccggaggttctgctgggagcctggggtctgtgagggagcggctgctgcctggcattgccctaagccggccaggacctgatccccaccctacgctggggctgggagcagacaggaaggacagagacacacggagaaggggcccagaccacgcagaaagaaggtgtgtctcggcagggtgtggccggctcccgggacgctagacaggagccacggggccccttcctggggaggaaggtgcagccatgcaaagtgagtccaggggacggcgaggggcctgacccgctcttctcccgaaactcggatatttccagtatgtgtccggcgtccccagaacgacacggagatggactggcttgcgggggaccccacgtcctcttccccaacacgaggagcctcgggatccattttcactgctgcaggcacaggggcctcctcagctcctcctcgtctgctgttcctgtttcgtcctcttcctgcctcgtgcttcgttgatgttctgcaaattatttagatgtgtaaatgaaataaatggaaaataactctcattgctcccagctggcctagctccgtccctcacccacctgccttgggggccaggaggctctaagatgtgaggacgctggacagagatcagacagaggctagacagaaacagcagccagaggggtacagagggcaggaaagagactggacagagatggacagagacaagacagaggggacagaaggggacagaaattggacagagatggacagaggggacagagggggaaaaagatggacagagacaagacaggggagagggggacagagactggacagagacaagacgggacagagggggacagagatggacagagactggacagaaacaagacagaggggatggggtacagagacaagacaggggacagaggaggacagagacaagacagaggggacagagactggacagaaacggagaggaacagaaaatgcatgggccggccaggtgaggggcaatgcttgggcacccccaaatcacagggcgaggaccggtactgggcagtgccacggtgtgacagagtgacgtgcagtcagggacagcgtccagtgtggacggagccttcctgatgcctgagccacccctgagctcacggggccaccctctggccgcgggtcctccagctccccagcccagagctgtccagcagcaagcgctgacctgggagacgtgccaggtggcgagtgggcgtggcacacaccgctggtgtctcaggcccttggctcccatctcggtgataagcacagcagggctgggcagagccgggccagggtccccatcaagagagaaggtggagggagcagaggccaccacgctgcacaccagggctgtgaccatggtggggtgagaggtggctgccacgtgggttcctggcagtgacccacacaccacacagagtcagctccaggctggccatggtgacgagtcttccgggatgggaccaatgatgggagggtcacgcccgtttcccttcctttgaaaacgagtctcccatacataaaaatggacggctttccttgctcaccctgtggcctcacaggccccgaccacacacccacacggcactaaggccctcccggcctcggccctgcagaaagccggagacctccgggaaccctccccggaacccctccccggaaccctccccggaacccctccccggagcccctccccggagccctccccggaaccctccccagaacccctccccggaacccccccacccacttcaccgtcgtggcctctgctttcgtggcttcctccccttcgttcgtgagaactcgggacatgtacacggagctttccacacaactcaagaaacccagccttggggctctgtactccccaggctgacatacggcgacctcgtgtttcggctttgctttcgcaatgcacggctgtgcgctcgggcctggctctggtggctgccgcgtgttggagactctgtccacgcaggtagcagggacagggccaccgccaggtcaggagcacggacggaagcaggaaacatctcccttcccgacagcaggactcgccctcctagattctttattttgaaaggaataatcatctttgactttaatgaaacacttttacttaaaaatagatcactcatcagaggacacacctgagactccagttcctccctggaaccttctagcggaaccaatcacccctcgtggctcctggaacagcctcacgtcggccacacccgacactttcatcaggttcacgagcacttcttgggcaaagcccagggtgtgaggattcactgctgtgcccacgtattttcccacctttttatttttttaaaatgcccaggcttcaatgataaatttttttttgagacagtatcttgctgtctcccaggctggaatgcagtggagccgtcacagctcactgtagcctcgacctcctgggctcaagcagtcgtcctgcctcagctccgagtagctgggaccacaggagcacactgccacgcccagctacattttttaaaagtttcttgtacagacagcgtctcactatgttgcacagatgggtctccaactcctgggctcaagtgatcttcctaccttggcctcccaaagtgctgggattaccagcatgagccatatgttcccacttcagaaggaaattcttcattctggctaacacggtgaaatcccatctctactaaaaatacaaaaaaaattagccgggcatggtggcgggcgcctgtagtcccagctactcgggaggttgaggcaggagaatggtgggaacccaggaggtggaccttgcagtgagccgagattgcgccactgcactccagcctgggcgacagagttagactccgtctcaaaaaaaaaaagaaggaaattcttgcttttgcccaaatatatttctttgtccaagtatctctgtgattatcatgaatagtgtaagtagccaagaatgaaaatcaaactaataatttacttatttcaaaagcactttaacccataacaaacccaacacccactttcttcaaatgcatttatcctttagacgtggcgagaagccggcgacatcatcatttactccaaggtgacaggatcaggtttccatgcagcattttccacctgccccgaccatgaccacagccacggaccctctggaaagtcaagactgggagaagctcaagggcggcccaggctcaggcgacttcccacccacgatggggcccaccagcccgacccggagagtgtccgtgaagcagccggccccgcaaggacggctttggccaccaaccggaggtgggcctcatcctcccagatccatggagtccttcagaatcgtgcctcgctccagtgtcccacatcagaggccatgggagggcgcgggagcctcagggttcctgccccatctgcccagagcctgcagccctgaccaaggagggttccccatacacgggcagaagctgtggacccagggagcctatcccacgccgtcctccgcatgtggcccgtggtgcaggaggggccctgggcaaaccaaggtgcggcccccaagtcccccgtacccaggggtcaccatgcctcagctggcctcacgcccgctccttcccaggggtcaccatgcctcagctggcctcacgcccgctccttcccaggggtcaccatgcctcagctggcctcacgcccgctccttcccaggggtcaccatgcctcagctggcctcacgcccgctccttcccaggggtcaccatgcctcagctggcctcacgcccgctccttcccaggacccaataatgctgccctttatcaacccccagagcagctcccgggccacaggtggggcctcctccagtcagaggcacctgtgccaggggctagggaacatggatctatgccagacaggctaagggaggagggaccgaggcaggaggggctgagggaggaggtgctgagggaggaggggcccagggctctccccaggcagctgggtcagggcatccaggagagcccagcttccaacaccactcagggtgggcggccgtccccctcccgggaaggtgcccaaagccctggacagtcacctcgaggtgactgtgggcagaaactgggcttggcctgccctccctgccagccaccccacccaggcctctccacaactggtctattcggggctcctctgaccaccactttatttttatatttttaagatggagtctcactctgtcacccaggctggagtgtagtggcacgatctcggctcactgcaacttctgccccctgggttcaagcgattctcctgcctcagcctccccagtagctgggattaatttgtttttgtgtttttagtagagacagggtttcgccatgttggccaggctggtcttgaactcctgacctcaagtgatcctcctgcctcggcctcccgcagtgctgagattacaggtgtgagccaccgcgcccagcctgaccatcagtttaatgccagggcaaagggggaggaggagacctaccctcgacccagcagaaggcccatgggagccggcacagcgacgccaagagcctccttggtgaggacactcggaccctggcccttgggatgctggccgctgacagggccaagcctggtgtggtggggccgtggcccacggtgatttgtgggccagcagcattgggggtgcacgcagggctgtgggaacggcagatgttcacctccacctgaatccagcagaactcccacccaccccaaaggaccccgttgctgcctccagagccgccactcacggacccttctccaaagctgctgcggtttgctgatgccgagaccccgaacagaagctgctggccccacgtttgtccccatttatggctgatgctttagccagtctttgatgggccggggggttgctgaacctggacgagtcccggggggttgctgaacctgggtggatgagtcccgtccattcacagatggggacttgtgccccgtcctgctgggtccctttcctggcctccacctcaggctcccaggcctacagcccaagcacacatgatgctggagaagtgaaaagctggttcccttcatttactcacagatgaaaagattaacacgtcagcaaatcaaaatcagagaattcctaaggcactctgtgcaacaggagcgggtggacgtgggggtgggtgcacgactggcgcggctgcctccacacgggccctcctgaagttaccttggcccggctgctggctacgggaacgctgggtcctcgatgccatggtcggggttgcagctgaaggcgatggtgatggcgtaacgggtgccccagtggaccttctccacgcggtgtaggttctcggaccccgaggtgaagaaggagacgcgacctgggagaggagaagagagagaggtggccatagagccacacccacggccacagccttcagagggtctgcggtcacctgaaagagcaactataaccaatcaacacaaccaaccaggcaggctggagaaattgcccctctgggaactgcttctgcaggaaggaggagctggagaaacaaacgcagcaatgctcaggggccctgtggcggaggaggggccccccggggccagcagggactctgtggtgggcaggacagaggaagatgctgcagatgaggccaccactggctccagacaccccaggtcatctgatctcccgagctccgggcatttgatctcctcagctctcatgggccttccagatctgacactttaggatcttatttctaatcacaggttgagaacaaaaaccaagccctgggggtgttctaacaaagaatcaggaaagacaagataaaacatccaactcgcaaacacctctctgtctcccttcaaggggtgatagagatgacgtctgaacaggcagcttccacggcagtaaccagggcccggggcctgagaggtcctggaggcaggggcctatctcaagagacgccagttcatttgtcttcacattgaagtggcgctgcctaccccaccgtagagtcctgtggtaaagcgttcaccgctggacacagccatcgaccgtcaccaagtgggaagcaaggggcgttgagactcagaggacaccgggctcccccacgtggctcctgacgtcctgtgacaatttcattccccttcaaaggttaccactggaaatgcaattccttcctttcacatttgcaaacttcactcgatctttgaaaggggagagaagtccatcccgggtgtgcagggcattctagcttcaagagggagtcagttgcactgtgcctggaaatagtggagcaaaagaaatcacgtggatgcaatggtcacctcttaatggaggccgggaagcgccctgggatgcaggcaaggcagccgatctttcccggaccgtgtgggccacctccagatatgcaggacacgtccttttccaggtcggctggagtcagggcaccttctaaccttacacttttaaaggacacattgtccttggtttcttccagcttcaatcgaggctgagacatcggcacaagcaggagggcccagcggctcgcgccatttgggacctcagtcgcccatgctcgtccacactctctgctctctactgctggcagacgtggttctcaggaggctgccagcattcagtaaaaggagggtctcctctggccctctggtgtttctgcacatcttgcaaacagaggcaccaaaggacagggggaaggatggaggacagctgagcctcgtgagctgtgggaggcaggaaaccacccaccatccacactactgaaggctcagacggagatgagatcaatacggggccagaaaaggactttttttttttttttttttttagacagtctcgctctgttgcccaggctggactgcagcggcatgatcttggctcactgcaagctctgcctcctgggttcacgccgttctcctgcctcagcctccctagtagctgggactacaggcgcccgccaccacgcccagctaatttttttgtacttttagtagagatgtagtttcaccgtgttagccaggatggtctcgatctcctgacctcatgacccgcccgtcttggcctcccaaagtgctgggattacaggcgtgagccaccacgcccggcctaagatgcactttctttagtaaatgactattagattatcacctgcttccttaaagcaggactcagcacggcaaccaaggaatcaacaataagcaatgctctcagcttccagaatcgcatgtgtctctcccctctcgggcgggtggtgagtccccggaggacacctgactccagccttcgcaccagcagcttcactggctctcggtccattaacttcttggaacccacaagacatcatccggaaacaaaaacatcctggggacacaggacagggattgtgtggtaaagggttgactccaggggcctgggcggtgcacaccctacaccctccagagagaggcctggcctttgccccggctcccaggggggacctctgagccctcagaacatcctgcctgataggagaacctctgtttaccagggacctagggccacaccagatggtccacactgacagtgtcacttatggtgggacgtgggccacagagcagcagctcagcatccagaggggctggggacagaggccagccgtgcctgcaccaccagccccccagtaaaaaccctggacaccaaggctcggccgagcatccctggtcagtgacacccccgaatatcatcacacatcactgctggagaactaagagctgttgacccaactccgggagaagacagtgggaagctcacacctggtcactcctcaacctgccccacggcctctccccttgctggattgttttttgtttttgtttttgtttagacagggtttggttctgtttctcaggctggaatgcagtatgcaatggtaggatcttggctcactgcaacctcctcctcccaggctcaagcaatcctcccatctcagcctcctgagtagctgggactataggtgcacgccaccacacccggctgctttttgtattttttgtagagacggggttttgccattttggccaggctggtcttgaactcccgagctcaaacgatctgcctgcctcggccttgcaagtgctgggattacaggtgtgagccgccccacctggcccccttggtggattttaatccatttcttttcactgtaataaactacagccaagggtataatggctttgctgagttctgtgagtcccaacagtgagtcactggacctaaaggtggtcttgggaacccccgaacacaggactctgccttcctcgataaagttgccctacaaagaaaactagcatttgccactcatggtaagaactgcgacacggccgggcgtggtggctcacgcctgtcatcccagcactttgggaggccgaggcgggtggatcacgaggtcaggagattgagaccattctggctaacacggtgaaaccccgtctctactaaaaatacaaacaattagccgggcgtggtggtaggcacctgtagtcccagctactcgggaggctgaggcaggagaatggcgtgaatccgggaggcggagcttgcagtgagccgagatcgcaccactgcactccagcctgggcgacagagcgagactccgtctcaaaagaaaaaaaaaagtctccaaatcacaggtaaacacatagatacacacaattagacagatgtacaacatcaaatcacaggtaaacacatagatacaattagatgtatgacatcaatcacgtaaacacacagatacacacaattagacagatgtatgacatcaaatcacaggtaaacacatagatacacacaattagatgtatgacatcaaatcacaggtaaacacatagataacacacagatgtacaacatcacaggtaaacacagatacacacaattagatgtatgacatcaaatcacagggaaacacatagatacaattagacagatgtacgacatcaaatcgcaggtaaacacatagatacacacaattagacagatgtacgacatcaaatcgcaggtaaacacatagatacacacaattagacagatgtatgacatcaaatcgcaggtaaacacatagatacacacaattagacagatgtacgacatcaaatcacaggtaaacacatagatacacacaattagatgtacgacatcaaatcacaggtaaacacacagatacacacaatcagacagatgtacgacatcaaatcacagggaaacacacagatacacacaattagatgtatgacatcaaatcacaggtaaacacatagatacaattagacatgtatgacatcaaatcacaggtaaacacatagatacaattagacagacacatgcaggagacaggttgttttaattatctgaaagaagatcgtaatacaaaatgtttgactcaagtatttatcatgcttaaaatgactaagatcaaaatatgctaaaaagttgtgtaatttcgagtcccaggaggcttcagctgcttgacttctcaagaaaacgcctgtcttgtgctctgtgagtttttcattttcccacaaaactgctgtgactgggacttctggggtgagggcagacaggctgggctcctgcttgcagaggctggacgtccaaacccttcccctaatgcagagatgactcagaacaactgacatgaaggcagagtgaggccaggacacagtcaggccaaacgcccccaatccacgccaggggagactgtgcccagggctgcggcacacacggcctgaagccggctgcagggagtgggcttggccagccgctggctacagcgggaactgtccagcctgtggccagggagcagctgagggaggcaggatggcaggaagtggccgggcagctcaggccacctgccacaggtggtcgtggaaagagagtccctcaaactgagcttgcaaactgaagtcgtaaactaacctgagaaaggcaagtacaaataacaggaatctcaaaataaacaagctggagatcttaaaagagatgaaagaagtcctgactgtcacacagtccctggtctgactgagcggccaggcaggaggaacacccgtgctgagaggccaccccacaggtgagggcagtgccctggggacgggtgaggcagcagggggtgagggcagtgtcctggggacgggtaaggtagtggggggtgagggcagtgccctggggacgggtgaggcagcgggggggggggggtgagggcagtgccctggggatgggtgaggcagtggggggtggatggtgctggcacagtccacagggctcccaagcctatgcgagtttcggctgcatctggggtcagggccgtgggctccacctgaggaggcccctaacaggggttccccactccccacaccctcccaccccaggatctgggcttgtgttacccacaagttcaaggagcagaggatgactgtccgctcggcaaatgctcactggcactgctgtgtctgcagcaggctgggcatggctggggctctgggactctgggactgcaaggtccagtgtgatgggttctgaagccggcaccgcagagccacccggtgaggttccagccaccagcgaggagggcactaggtcaccgacactgggctggggcctcgtctaatcttaggttgcgagtctctttgagaagggtacagaggtgaacgcactccagaggggagggagggagaccctgaccgccaaggtgacacacaccagggagggaaatggatggtgcctgtcaaggtgacacacaccagggcgtggaggggggctctgccgctgactgacggtgacctcagacatgtggccccgtagacaccagcctcctgggtgttgggactggcgctagacctgggaatcactcagcaccggcccggcacacagcagatgctccgtgaactcagcctcgctcccagggacacgccccccacacccaccgtgcttgcctgagccaggagccccacgcccaggccccgcccgcgcctcctaccagctctcggctccaccgtcttgttggcaccctcctccatgaacatgaaccgccctccgccgaagtcctccaggtagttggagaggtacagcagcgaggtgtagtcgaaggagccgtaggtcacctgagggcagagccgggaggagggggcagaatgggctctcagcatgcgaccagggcaggtgctgcttctctctcttattttttgtttatttattttttgagacagagtcttgctccatcacccaggctggagtgcagtgatgcgatctcggctcactgcaatctccgcctcccaggttcaagcaattctcctgcctcagcctcccgagtagctggggctacaggcacccaccaccacacccagctaattttgtatttttagtagagacagggtttcaccttgttggtcaggttggtctcaaactcttgatctcaggtgatccacccaccttggcctcccaaagtgctgggattacgggcatgagccactgaacccagcctctttttttttttaatagggtatcgctttttttacagacagcatcactcaggctgtagtgcagtcacagcactgtcattgcttaccataaccttgaactcctggctttaaacaatcctcctgcctcagcatcccgggtagccaggaccacaggcgcacgacactacaaccagctaattttttcttttctatttttttttttgtagagatggcatcagtccacccactttggcctcccgggtgctgggattagaggcatgagccactgtgcctggctgatttttgtattttttgtagaggttggggcggggtggtgggggcaggggggcgggtctcgctatgatgcccaggctggtctcaaactcctggccccaagtgatcctcccacctcagcctcccgggtgctgggattacgcgcgtgagtcaccaacatctgtgcttcttattttccagaaggtaaattaacaacatgtgtcggccccattaatgaggccatttgttcctttgcaactttaaaaaccctctgcagagtctccagcctcatgcattgttgcccaggatttcctgtaagctcagatgttggagcagccgtgttccagcaaaggctacgggcagcaggccagccagcagggtgtgcatgctgggatggtcccccggtgccagcctcgctgcccacacgtgggaaccagaggcagcggtggacgcgcttttctcctttcttcagaagtggagcaatcccaagctttttaaaacttgtaataaaatgcagaacctaagattttccagcttaactgtgtcttcactgtttttaagcacagttcagtgatgttaagcacatttccaatgttgtgcagccaccgcaccgtcctctccagaacatctcatcctcccaggccgaagctccgtccccaggaagcactgactccccacgccccccagtcctgccctctccattccgctttctgtctctgtgaacctggcgactctagggtccccacggacgtgggatcaggcaggatctgtccctccgtgactggcttacttcactcaggggtcgcagcactcagcttccattccagaacccagctggggccacgccctgggggtgaaaggtgcagctgccaggacaccagctgcaaaggggagggcgcatctcacccagctcagctgtcataagcacacccagaccagggagggaaagagacactctggggagggaagggggatggagccgcaccagcgcggaactggacacccactgtgcgggcgctgagctaggtacatcacacacaacagagcctcgtgtgcagtggagagagcccaggcttgaaggcagacaccgggccctccccctgggcaaggtggcctcctctgagtcctcctgggaaggagagcaggatcacgctggggcccagcccccagtccgacccgccaatatccacctcacataatccgctgtaaggaagcccagtctcaggtggtgccctgggcggtgggtcaagctccctcccccctgcccctcccagctgccaggaggccccttgggctcagctcccatgggctttgccccctccaggcctcacagatgccccccggagtccccccttaaaagcttcccaaacacaagtccatgccaggctctgattctggggagaccagagtaagacagacgtcaagtgagcaaagccgcgtgcggactgcactgccttctgtaaaaaggaaaccataccagggtccatgatctgacagccacagctgccttatgttatgcaatgggaagaaggaacaattgccaaaactgttttaaatgtgattctttacaactgacagaatgcggtattcttatgcattcgtttttatacacacagagaaattcaagaaggaactctgagatctcaggactgtggttacctgtaggtgagggggttactggttcgcctttatttatatacatatatatatatatgacttttaaatcttgtaggatgcattacttattcaaatattcaaattttgatgcatgatttattcaaaactaaatttaaaataaagtacactggccagaagtcatagcaaaatagctccccacagaacaccacgaaaatcacccaggtttctaaacagttctgtttcactgaagtaaagtctctgctaattagaaaaacactgatcttcagacgccactttggtttcctgatgagcagacaaaattcggtcaggggccatggaaggagccgggagcgaccggaccagggcgaatctgctgtctgtgccggcggaaggccagtaagtgccgtgcagtcgtgaaaaaggaagtggttaaagtggttacggcaaagcggtggcgccggctgctcccgacactgcagcccgagagggagagaggaggactgaaggcagtcccaggccttgggttccttcactgttcctgttcccttgggtttaccttttttttttttttttttagatggagtcttgctctgtcacccaggctggagtacagtggcgcgatctcggctcactgcaacctccacctcctgggttcatgccattctcctgcctcagcctcccgagtagctgggactacaggcgcccgccaccacgcccggctaattttttgtattttagtagagacagggtttcactgtgttagccaggatggtctcgatctcgtgacctcgtgatccacccgcttcagcctcccaaagtgctgggattacaggcgtgagccaccacacccggccctgggtttaccattttaatgccaagtagcagagtgccaagatggcagatgctgattgcagattataactgcaatctctctctccttctgattacaactgaaactgcacagagtgcactttgggaggcagaggcaggtggatcacctgaggtcaggagttcgagactagcctggctaacatggtgaaaccccgtctctactaaaaatacaaaaattagccggccgcagtggcacgcacctgtaatcccagctactcaggaggctgaggcaggagaatggcttgaacctgggaggcagaggttgcagtgagctgagatcgcgccacagcactccagcctgggtggcagagcaagactccatctcaaaaaaaaaaaaaaaaaaaacaaagactgcccttgaagaataatttagtaacaaatgtcacacggcacagaaagctggtcatctaactgccattccttcctctgtcacagcgggcatggtggggcagcaagagtcctaatctccccagccatgtgctttctggctttaatcttctatttgagcttcagctccagggctcacagtgccattcaaccacttccatccaggttgactgtatgaagggaactcacagcttctacaccataaaaatcacccttaaagaattgctataataccattctttgtattagccgtgctttacttttatcttctaaaatcttttattaagggccaggtgcggtggctcacacctgtaatcccagcactttgggaggccgaggcaggtggattgcttgaggtcaggagtttgaggcctgcctggccaacatggtgaaaccctgtctctaataaaaatacaaaaattagctgggcgtggtggtgcatgcctgtagtcccagctacttgggaggctggggcaggagaaccgcttgaacccaggaggcggaggttgtagtaagccaagatcacacaactgcactccaacctgggcaacagaacaagactgtctcaaaaaaaaaaagaaagaaagaaagaaagaaaaggctgggcatggtagctcacgcttgtaatcccagcactttgggaggccaaggtgggcagatcacctgaggtcaggagtttaagagcagcctgaccaatacaatgaaaccccatctctactaaaaatacaaaaattagccgagcgtggtggcatgtgcctgtaatcccagctacttgggaggctgagacaggagaatcacttgaacccaagaggtggaggttgcagtgagctgaaatcgcaccattgcactccagcctgggcatcaagagtgaaactccatcttaaaaaaaaaaaagaaagaaaagaaatgggatgggtaatggctctcgcctgtaatcccagcaccttgggaggctgaggcgggaggattgcttcagcccaggaggtcaggccagcctgggcagcatagtgaaaccctgtgtctacaaaaatagaaaaacgagccaggcgtcggggcacgcacctgtggtcccagctatagtctcagtcccaggctgaggcagcaggatggcttgagcctgggaggtcaaagttgcagtaagccatgactgcacacctgcactccagcctgggtgacagagtgaagctgtaactcaaaagaaataaaagaaagaaagatagaaagtggtaaaagaaggctcccagagacaacacagagacctgggccacagagagcatgagtggctgagcagagaccatctgccgtaagaggttaagcatcagtctgttaataaataacaatggggtaaccacaggccgtgtgggccgggttctccacttcttcttgtcaccatcaaatgagaaattttatttctccaactccatcagtgagattgagggtgtgccctgaaacctcagagaggaagacatctaaatgcttacacccaccgggcatggtggctcacacctgtaatcccagcactttggggggccaaggaaggaggattgcctgagctcaggattttgagactatcctggccaacatggtgaaacctcgtctctactaaaaatacaaaaattagcgaggcctggtggggcatgcctgtagtcccagctactcgggaggctgaggcaggagaatcgcctgaacccgggaggcagaggttgcagtgagccgaatcgcgccactgcactccatcctgggcgacagagcgagactctgtctcaaccaatcaatcctaacaccatgcacacagcaggcggatgctgcaaaagacagccctgtggtaggtagccccaggccacgggagaacaggcctcaccttgaccacatgcgcgctcaccctgtccacatgcgcgctcaccctgcccacgtgcgtactcaccctgcccacgtacgcactcaccctgcccacgggcacgctcaccttgtccacgagcgcgctcaccctgcccacgtgcgcactcaccgtgcccacgggcacgctcaccttgtccacgggcacgctcaccctgcccacgggcgcgctcaccttgtccacgtgcgcatgccagtactcgtcgtgcgccgtccgcgcttccgtgctgtttatgcgggagaagaaggtgggcttggtcagatgcagcgaggatgcgctgatgccaaaagcctcagcaatggtgagctggaccttctgccgcacctccctgcagaggacacaatagccgtcagcgcagccccaggcgggaggggacgctcgtgggtcccaacccgtgggtggcaggaaaggaaccagccttcgtacggctccgggcccgcggggcgggggctcccaagcacaccgggaacagataccggctccgcctgggaacgacgcggcccacagcccacgcacagagcagccagaggcaggcgcaagaccacagcagcaggactggggaggcagaagggggcctgcaggaccaacgctggggaggctggtgtggagtcaggccccagatgccagagcctccaggcttcacttgcagggcctggagcccagcctcctattcagcaacgaagaggctgctgtcccccaacgtgagtgtgcggggtgtgtggacgtggggagaggggagtgggtgtcgagcctgctaagtgtggatggggtgtctgtactggggacaaagggactctcgctcagaagaccccatgtgccaggccagagcggctctgaaatggatgtctgggtgggcatgggcccatgtggggggctcgaggggggtcactcatgtgtcctgggatggttgcgtgactcttagctcctttgccctcatctcaacctgggctcctccagcagaattttttcttttcttttcttttttttttttttttttgagatgaggcttgttctgtcacccaggctggagtgcagtggtgcaatctcagctcactgcaacctccacctccggggtttaagcaattgtcctgcctcagcctccggggtagctgggattacaggcacccgccaccgcacccaactaatttttgtacttttagtaaagatggggtttcaccatgttggctaggctggtctcgaactcctgacctcaggtgatccacccgcctcgcctcccaaagtgctgggattacaggcatgagacaccgcacccagcctcatctggcagaatttttaaaactgggctgattttacacagcagaaaacaagaggttctgaccaggatgcagccacaggattccagatctgtttcaccgacccgggcgcatcctggccacgctgggcctgccccggcctttgctccatgagaactcacttctgcaggcctggccctggcccctgggcctctccgtggggcctccccggaccggccagctctgccacacccctcagccccaggccaccccgcctgcgaacccccacccgcctcactcctccttaccggtataaccggaagtcctcctctgagaagatgttctgtattttatccccgaagtatctgtgaaaaaaggagtattcacaaaggtcacaacacttcattaatctgttgttcatctcctttcagttcagccattcctcaagtccctgaaaatcaactcacacattcagagcaactccatttccacaatgataactgctataaaggagccgggccgggcgcagtggctcacgcctgtaatcccagcactctgggaggccgaggcaggtggatcacctgaggtcaggaattcgagaccatcctggccaacatggcacaaccccatctctactaaaaatacaaaaattagctgggcatggtggtgcgtgcctgtaaccccagctactcaggaggccgaggcaggtggatcacttgaggtcaggaattcgagaccatcctggccaacatggcacaaccccatctctactaaaaatacaaaaattagctgggcgtggtggtgcgtgcctgtaatcccagctactcaggaggctgagatgggaaaattgcttgaacccaggaggcagagtcaaatgagtcgaaattgcgccactgcactccagcctaggcgacagagcaagattccatctcaaaataataataataataataaaaacaaggagccagccgggagcaagacccagggctaatgcatgaggctgacacggatccacgcagggagggtctctttgctctcccggcccctcatggagcgtcaaaggccccgttggattcttggaagctgctcctgggagcctcccatctctgctgcctcttgctcccatcccttctgtccctgggcccacaaaaacaccagattcccctaaagcttcatgaacaagccccctgcccacaggctgtggagagtccacacctcccagctcttgcgtcccaaagaaccaggaaggacccggccaacatcacagccactgaggccctgaggctgcaccgagccggatcctccctcacatgtccacgtgtccacatgtccatggctaagaggcacggagccgctcactcggctttcagagccagcactgaggtcatgctgcagcactcacctgtacaggttcacaaagtgcttcccgacagacagggcccctgagtgcaagtccagaatggatgcctggaaaagacgttgtggagtaaagcgtgcagccgcagcaatggcaatggctgttaaaagtcatggatggtaaatgcgagtttccaaggtctggccagcacacacctcaggtgtttttttgtttttgtttttgttttttgtaaaaaggatcttattctgttgcccaggctagggcgcagtggcacaatctcagctcattgcagcctcaatattccaggctccaggccaaacaatcctcccaccctctgcctcccaagtaaaggcgctcgccaccacacctggctaatttttctattttttgtagagatgtggtctcactatattacctaggctggtctcgaactccggggctcaagtgatcctcccacctcagcctcccaaagtactgggattacaggcattagccactgcacccagcctcaacccaggactttcttaaaatcctcccagaccggccagacgtggtggctcacacctgcaatcccagcactttgggaggctgagacaggtggattgcttgaggccaggagttcaaaaccagcctggctaacatggtgaaaccccatgtctactaaaaatacaaaattagctgggcatggtggcgagctgtaatcccagctgtagctgggacacctacagagatagcctcccaaggagctgtaatcccagctacttgggaggctgaggcaggagaatcacttgaatcagggaggcggaggttgcagcgagccgagatcgtgccattgcactccagcctgggctacaagagcgaaactccatctcaaaaaaaaaaaaaaatcttcctggaccaaacacttttgttccctgtgacctaaagaatggtggcacgtgtgggctatttttagtctggagccatctccgtgcagctccgtgccagtcacagtcatgtgtccctgtgggcaagtgttgacttctctcgagtaaatgcctcacagcggtgctcccaccttggcctcctgggcggctggcaccacagtgcgcgccacgccaagcctgagtcatcactttgtaagccactgctgaagtgtttcctgcccgaccacccacctctcagtccttccctacgtcctcagaggaagaggcttccagcccacgttagtcatcccacctgtgaccccagaggagccccactgctgccccttcctcatcgccacagccactggccctgcggcactaacctagcttgggcccgctgaacagtaactgaacccaaagcagcggcccagccagctccatgcaggacaacttcccatgtgaacgtggaggagctgtgaaacagaaacctactcactcacagatctttaacaaatagcccccgaactgaaccaaaccaaactgaaataaagggaggaacttaggccgggcacggtggttcacacctgtaatcccagcactttggggggtcaaggcaggtgggtcacctgagctctggagttcaagaccagcctggccaacatggtgaaacctcatctctatttaaaatgcaaaaattagccgggcatcatggcacatgcctgtagtcccagctactcaggaggctaaggcagaagaatggcttgaacccaggagttggaggttgcagtgagtggagatcgccccattgcactccagcctgggcaacagagcgagactctgtctcaaaaaaagaagaaaaaaaggaacttaattttcagaactcaagagaaaagagtttgcagaaaaaagtcacacagaccatcacagaaatactttgaaattctcaaagagtctataaattaattttctagaagtttcaaatatgcagaaagactcaagtctattcagtgattataattcaaagcgatcaccaaataaacagagagaaacagatcttcagacaattccacacaccgagcaagaaaacaaccctgaggaaaccgcatgggaattggagctaacaccagctgcaccagactgactcccagccactgcccaacaggagggcgaggccacagccggcggtggctccatgatccctgcggctgtggtaacacaaactggggctttaaaacaacacaagtttattctctcacagttctagagcccaggagtctaaaatcgaggtgtgggaggggccctgctccctcccagggctccaggggaggtcctgcccgcctcttccatggccgcactgctcccatctctgcctccatcatcacaggaccttttcctcctccctctcaaatctccccctgcctctgtctcctataggcacttgccattggatttaggaccctaaatctgggatgatgtcatcttgagatccttaagttaattacatctgcaaaggtcccttttccaaatcagatcatgtccacgggctccaggtgaacacattatccgaggccactagctgaccccctgcagcctcacatgggacgacagccccacagggcgtccatggaggcgtccagctaggaagttgcaggatgcgttgcagcgtgtctgtcccacggaggccctgctgtttcccggcagctccacgggctctcctgtgtccagcatgcgcagccgtctcctcgctgggctcccaccccgctcccttgccggctccctgcttccgaccccctctatcccccagtgtgaactggagccaggcaggccgtgacatgccatgaatagatggccacgcacatctaaggacacactcttcccaacgaggggacgccgcacgggtttcagtcaggcgcagctgctgcggctggtgctgagaaacaccacggcaggccccacccacatttgggggcacgcagggaaccctgcatgtctgtgccttccccttcccatccaagtgagagcaaagttaacgggtaaaaaaaggggggcagggactacattcaactcacccctccgtcagatcctcccagggagagccccttttcagctacgctgcagggagaaaataattcagaatttcgttgctagaattgtctataatgtataatctaggcaaacgtcaatcagcaaaattaatgcaacattagtgggtcctgcgtgtttaatgtttatgatgtaaacaaatgtttagaccaaaggactcaactttcaaagttcagtgcgtaagcgacaatactgccatcgttgtcttgtcaatatttgactcagcttagaaacgactgggcttcagcaccttgggaggccaaggcgggtggatcacgaggtcaggagttccagaccagcctggccaacatggtgaaacctcgtctcaactaaaaatacaaaaattagccagctgtgatggcaggtgcctgtaatcccagctactctggaggctgagccaggagaatcgcttgaacccagaaggcagaggttgcagtgagccgagatcgcgccactgcactccagcctggacaacaaagcaagactctgtcaagaaagaaagaaaaagagagagagagagagagagagaaagggagggctgggcttaatctctcatcttcaatatcgaaagccacctgggccaagctcaggagcctggggagcatctaggggagggcccactgctccccatctctcctggaaccccaggcaggtgggggaagctttgagattcaccagctcaggagataggggccctgaccatggtgggagaaagacacccacacgccagctgtgctggaccacagaggaccaccctgagctgccacaggtgctgggagctgcctgtggacaccaagtggggacacgccggtgcctcagtcagacagcagtaaccccactggagctaggcagcagtaaccctgcgtggagctaggcagcatcctcgggggcaggctccctggggagaatctcagggcagggcacgtggcccagggctgcacaccattccacatgcttatcgtctcaacaagtggttggaaaatcaaaactttcttttaagatctcagtaagaaaagtccagcaccagtagcctctgagtggcatcctgtgctgccacaagtcatagccaggtgggctgacgggctccctggaggcagtttcagagcagacactgagcggtcattgagcagtgtcccggaggctccgtggggagcatggggcactcagcagcagcccccagaggcggccacaacccctgcagaggaacctgggcctctgggtactctcccagctactgcttcgctgagggccatggtctcctctcctgaaatcggaaaatctgagcttggcccttgaaagcacataattcttttttttttttttttttttttttttgagatggagtctcactctgtcacccaggctggaatgcaatggctcaatctcggctcactgcaatccctgcctcccaggttcaagcaattctcctgtctcagcctcctgagtagctgggattacaggagtgtgccatcacactcggctaatttttcatattttagtagagacaggggtttcaccatgttgcccaggctggtgtcgatctcctgagctcaggcaatccacccgccttggcctccccaagtgctaggattacaggcatgagccaccgcacccagcctggaaattcttataaaattataataaaatcttttttttttttttggagatagaatctcgctctgtcgcccaggatggagtgcagtggtgcagtcttggctcactgcaacctctgcctcccgggttccagcgattctcctgcctcagcctcctgagtagctgggactacaggcacatgccaccacacccagctaatttattgtattttagtagagacagggtttcaccatgttgcccaggctggtctcgaactcctgaactcaggcaatctgcccgcctcagcctccccaagtgctgggattacaggcgtgagccaccacgcctggcaataaaatccttaaaaccactttattactaacaatgctctgcttcccgccctagccccactccgcgtgtgtttgtttgaatcccaccgtgctcagggacaggcggttacctgcgaatccgctccgcttcctccctggtgatgacgacatcggtgacacctctgccgcactttcggggagtgcagcctgtgaagggacagccagggtgagacgcagtttccaaggccaccggcgcatgcccttccagggaatcagggccagaactggctaatacgcccggtcaaatgtgaatttcagacacacacaaccacagctctccagcgtgcatgcgctttgtgcggtgcatctggagttcacgtctcactgggccaccttggcttccagtggctccaactggaaatttaatccagaggcacctgttgctgccccaaaccctgggaaagtcacagaaaccccagacacggcgtcaacagcattcctgaaccatcactgactgcaggtccagacacccacaggcaccgtcagaaaacccttctgagaccaccagagcagaaaaccctcctgagaccgccagagaggaaaaccctcctgagaccaccagggaggaaaaccctcctgaggccaccagaggggggaaccctcctgagaccaccagagcagaaaaccctcctgagaccaccagagaggaagaccctcctgggaccactggcgcagaaaaccctcctgagaccgccagagaggaaaaccctcctgagaccactggagcagaaaaccctcctgagaccaccagagtggagcttgtgggtctagtcccagtccttccccagggcacagcgaactgctccgcacatgcccctgtctctccccgtaccttggtgacctgcggaggctgagagggaagaggaagcagcagctcaaatgggggtcagggtggtcggggcaggggcagggtcgttgggacaggagcaacacggtcggggcaggggcatggttatcggggcaggggcatggttatcggggcaggggcatggttatcggggcaggggcatggttatcggggcaggggcatggttatcggggcaggggcatggttatcggggcaggggcatggttatcggggcaggggcaaggtcgtttggggcagcggcagtgtcgttgggacaggatcagagtggacaggagtcagggtcattgggcagaggaaaggtggacagggcaggggcagggtgtttggggcaggggcagggtggtcagacagggttagggtgtttggggcagggtggtcagggcaggggcagggtggtcgaggcagcatcgcacagatgcacaaggtacagcagagtgtcggagaggggcccagggacccgcccctgtggtttggtaccaagtgcagctggcttcatgcgctggaaaggcgtcaggccatgcctgatcgatcagacagcagcccacaagcaccaggacatggggcaaaccgggactccacaatatgcttttcctccctctccctacatcctgcctaaaaagccagccctgagcctggacgtggagcatccctcccgggaccatgggaataaaagcctcgcactcagtgctgagtgccagcatcaggggcttggacccagggatcacaaggcaccgagatgaccttggttcctttctctgggccttgtgccaggagataaacagagctccacttggctgaatatcagggaaggggggctgtagttactgtggttaaatgatctaatggacataggtgttgtatttcaaaaacaaaaagtcattttatgcttttttataaggtttaccccacaaaacgcgaggacacaggaaagcggaaagcaaacagcaaatgcaatgagagccacacaggcccgtggcgcagcctctgtactagcaaagagaatcactagagggaagagagggtcccccgcggcacaggagcgactcggcaggaaggggaaggggcagcagacagcagacagcatcgccccatgacacacgtggcaaccaaagcacagacgctgctgggtccatgctcagtggaggttctgacgcccctttccatagccggtgggtgaaggagacagaaactggtgatgagaatttgtgcacacgagcgtgggtcaggagaaatacccacaacgttgtgaaaagggaccaaaaatcccacgcatttccaaatcttttaaatttccaagtaattcatgagttaaaaaacaataataataaaaattagaggccaggcgcagtggctcatgcctgtaaccccagggccttaggaggccaaggcaggtggatcacctgaggtcagcagtttgagatcagcctgggcaacataggcaaaacaccgtctctactaaaattacaaaaattagccagacatggtggcaggtgcctgtagtcccagctactcaggaggctgaggcaggagaatcacttgaacccaagaggcctggcggaggttgcagtgagccgagatcatgccactgcactccagcctgggcaacacagtgagtgacactctgtccaaaaaaaaaaaaaagaagaaagaaagaaaaagaaaatacatcaaaccatttgttttattgtaaaatatatacaagatagaatttaccattttagccaagctttttaaaaagtgcgcagtgtggtggcatcgggcacaatagcatcgtgcagccgtcactagcaccacctccagaacttttccacctcccacaggtgaaatcccaaatctattaaacatggacttccatcctccctccctcattccaacttttttcttttttggcggggggtcaggatctcgctctgtcacccaggctggagtgcggtggcacactctaggttcactgcagccctgacctccttacctcccaacctcctgggttcaagtgattcttccacctctgcctcctgagctggggttacaggcgtgcaccaccacacctggcccattttttattttgtagagatggggtctcactgtgtttcccagtctggtcttgaactcttggcctcaagcgatcctcctgcctgggcctcccaaagtgctgggattgaggatgagccactgctccaggccattgaaactatttttaatgtcgataaattattaatgataacatgaaaaatttctgctccgtgctagcattcaaaaaagagttttggaaagctgggatgttagagagagaacttctgctaagaaagagagagcacccacaacaacacacaacagaaacacgttcattttcttgactccgaggcggtcccgtccctccctgcggcgcggctgggaccacgttcacgtgcgtcacaacggcgcccctttgtggaagaacttggcaatcttttcttggttcaagtgcaaagcattgaattgaatttttaaaacctgaattctgcctcaaaaacccagcggcgcatgctggacttttaaaactaagaatatatccaggtggcatggaatgttcaagaaaacagaagcgacaggaggcctacagggggtgtgcggtggccggcccggtcagacctgctccgaggccgtgcgctctccaaggtgctgaaccccggcccggccaaccgcagcgctgctccaggctctgggctgccctggaaccaccacctcccgcatctctcaggcccaggcagaacgggagcgggggaggggagctggggcacaggacggcagaagggctgctggtcgtttcttgttacattttccccaacattctctgactctaccacattctccagtcaaaaaatctttctggttttgactttctcatccctatctttccaaggcaaaccatctcctccgctggaccgcacagcttactaaaacgccaaccgtggccgggcagtgatgggcagggcgcgaaacacctgcactcccagtcagacgtggactagccagcctgcaggaggggagaggttgtctgctacccccaagcataccacatccaacccaattcccaccccttcgtcgcagccaatgtcctttaaccacactgagtctcattttaaagtgttgctttcctgaactaccttcgaacctgcggtgactgtcgtagtcctcagagcagggcacctcgatgaatctccctgccacgacctcgccacggcgggccaggacctctgcgaccccgtcgtcggcccccaagctgctccagagcaggagtgcggtgagcacaaagccagcccccaggcccgcggtccttagccacggcctctgccacagcctctgcacctcccgcggggctcggtccttcttggtgctgagaacagaaaacaggccacgtcacccaaacacggagtgaggccagagaaaacgctccccgatcatcaaagtgcatgcaccatgacccggccttcactcacacgtcacccctgaaacgagggcttcctgcctggggccagcgctgtccactcaggaaacacggactcttccctccctttcccttcagggatctccaatacacactaactgccttctgagcccgggagtttgagaaatattgcaatagagactcatgggttttaagcaaaagaaaaaaaaaaaaaaagccagacatgctccttataaaagccacttcaggcccggcgcagtggcttatgcctgtaatcccagcacctggggaggccaaggcgggcagatcacctgaggtcagggtatcgagacgagcctgaccaacatggtgaaaccctgtctctactaaatacaaaaaaaaaaaaaattaaccgggtgtggtggcacatgcctgtagtccctgctactcaagaggctgaggcaggagaatcatttgaacccgggaggtggaggttgcagtgacccaagattgtgccattgcactccagcctgggcaacaagagcaaaactccatctcaataaataaataaataaataaacaaacacacaccactttaatgtgagatgtttcacaacaaaataaggatgtttaaaagggtttgcttagcaaaatgggacaggatggggtgccctgtggtgcagctgctctaggacaggctggtagtgatgggggcctccacacaggggtgaacactaaggacgggggccactggaggaaggttgtttccagggtggggcggaggtgagccccctacagctcaggttattccatcagggccgcactccctcccctcctgtaaaataagcttctcgtctgttccaaggagcaggtattgggcctgtcccaacaatgataagagaggggctttggacacatgtatttccaaaacttgaatagagactcatttaaggcatattaggacaatatttcttttatttttttatttttatttattatttttttttttgagacagagtttcactcttgttgcccaggctggagtgcaatggcacgatcttggctcactgcaacctctgcctcctgggctcaagcaattctcctgccccagcctcctaagtagctaggattacaggcgtgcaccaccacccccagctatttttttgtatttttagtaatagagacggggtttcaccacgttggtcaggctggtctcgaactcctgacctcaagtaatctaaccgcctcagcctcccaaggtgctgcaattacaggcaagcaccaccaggctcagcctcaaaagtctatatttctatattaaccattcagtgctgacaaaaactggtactcggtatttcagaaaatgtacaagtttactggaaatttttaaaatgtattaattaaataacttctcatattactattgaaggaaatagatacatgtatgtttatacttgaaatattcttttggagagatttggttttgggagaaggtagaatacttataaatcatcactaggtcattcatttataaaattatagttgcaagctagtctgatggtagtggatccccagaacttattaaccttagtgtcaccaacgttggtatacaaccccccacaactaaatttgactggcttttaaaaaattatagctgtggccaggtgcagtggctcacgcctgtaatcccagcactttgggaggctgaggcgggcggattgcttgaggttgagagttcgagaccagcctggccaacatggtgaaaccccatctctactaaaaatacaaaaattagccgggcatggtggcgggcgcctgtaatcccagctatttgggaggctgaggcaggagaatctcttgaacccgggaggcagaggttgcaatgagccgagattgcgccactgcactccagcctgggcaacagagcgagcctctgtctcaaaaaaaaaaaaaaaaattatagctgtgaactagcatgaggcatttaagatcctatctagtagactccaaaagcagctgagatgaaaaagggataaaaatctcaagaacaaactatgaggtttaagagttattgcagtctatccaaacctgaggtgtcctcctgatatttctaaactgacgacttcaatgtgcaaatcgtcaatagaggggaattgggcactccccaaaagagcaaaatattaatatcaagcaagcgagaagctgtattctgcacgttagaggctccttcactaatacctgcaaaccaatgatcacccgtaacattttaaaatcctaaaactaagccattcctccatggcacccgatcctctagaattccacggggaaagcaggtttcgtggtttaaaagtgaaggcggaggcacgctcctggctcaggcggactttccaggctgctgggtgggttattccacgggacagcgacagccaaacggcaggttcccggagcagcagcagcagctcatcaggctgggagcaaagcccccttctctttctcctgcccctctgggataggtgggcctctgccgtcggctaccgcggctcccgcccgcacctgccctgctcccagcatgggctgcggtagaccccgccccccgcggcagaccacgcccacctgcccccccccacccccccacccgggtcgggccaggccccgccccatcagccccagtcccgcccactccatggccctgtccgccgccgcagcgcgcgcccttcccctcctcaccgctacctgctccggttccggcgctcggccgctccgttgccctcgggcgccttggttgcggccctccgctgaggagccatcggaccaggccgccgcggagccgggccggacgcgggcgccaggcccggggacgaacgccgtaacagggagcgcgaggcaggcacggcgcagggacgcgagtgcgacgcgctcggccatcggcccctgggctggcggccaggcccgagcaatcggcggccgagcggggcggggctcagagcggaggcggcggccgcgagggcggggcggccgggcctggctgcgcccccggacctcgcgggaccgcggcggcgcaggtgaggtgcgggtgcggctctggctctgcgcgctaggccgggcggctcctggctggaagcgtttcccccgcgccagtacctgaagagggacggccgggctcccgagcgacgcctcccagcgtggctgtcccgcagcggcgatgcggggctgctgagagaggctcgcacagagcctgtgggtgtaaattgtgtgtaactggtcgtatgtacaaactgaaagtgctgtgttacagagcccttagggtcagcagcctccgaacccctgcacggaaccaggggctggattactgaactgagtctgtctcacatgcaaagctttcctttccttttctcacccaatcctttgtgctttcatagtagataggaaaaataaataaaaaatacataaattttacccttccccagctgcttcgttatcccttggatgccgcctttattcagtataatactacggtcagctctgatgcacttgggggctttttcaaaattatcagcttaccttaaatcctagacagttttctccaacctggagtcagttttgcagtttcttcctctttataatcaagctgatctgagctctagaaatacaaattagttttaatattacctaaaatttggataaatttcctacagaagcatcatattgtgcggcctgataagaaaatgtttagaggcttctgcccgactgttttcactagcatagtacatctagtttaacaaggtctttaaaacaaggttgtttggcagttatttgtgttattatagatcataaccatcttataaacaaactagtgctgttttgttttagcaacaaatcacacatagcagaggtctctatatcttaacatggaggtagacttccagttcattttcatgttagcaaaatgagtttcctccaagttaatctatcaaaactggccagtatcagaactgaaactgaaagtataaggagaaaggcaaagggagaagcttctgcccctgttgataactcttgattttctccactaggaagaagtccccaaggagacttcgccataggagttcacaggaaatattgaaatgtcaggttccactccatttcagatgagattagttcatttagaccttaaaggagctccaccaaaggtctcgtacctctcagaggtaaggactcccttttacctctagagcattactttttgccttggcttcattctttaaagttttgagcagtgttctgtggaaacgggtacctagaacacaaccacaaggttctcggtggagcaagatggtggcagcagcattgattttgaatttcctccatagcctctcacaaaaacagaacaaccaggatgacaaaagggaaaaaaaaaaaagacagagaacaaaagaaactcacagcttctttcttttgggttgaagtgtatctttccaaaaagatatgttcaagtcttaacccctgggacctgtgaatgagaccttatttggaaataggatctttgcagatgtaatcaaaataagatgaagttgtactagaatatggtgaaccctaatccagtgattggcatccttatgaggagagggaaatttagagcctgagacacacggagggaaggcagtgtgaagacccaggaggatgccccgcggtgccagcagccaagatggtcatgacgtgccacgaaccccaggatgccgaggacagctgacgatcaccagaagctagagagaagcaaggaagggtcctcctcttcagccttcagggagagctgggtctgctgacacctggattttggacttagggcctccagaactgtgagagaataaatttctgttgtgtcaagccgcccagttgtttgtttgttttttgagacggagtctcgctctgtcatccaggctggagtacaatggcgcagtctcggcttactgcaacctccacctcccgggttcaagcaattctcctgcctcagcctctggagtagctgggattacaggtgcctgccaccatgcctggctaatttttgtatttttagtagagacggggtttcaccacattggccaggctggtcttgaactgctgacctcgtgatccacccgcctcagcctcccaaagtgctaggattacaggtgtgagccaccgcacccggccaagccacccagtttatggtcatttattacagcagccctagaaaactaagacactcttcaacaaaattaggtatcagggtgtccccatggatcccaaactacaagtgggtgggaccaaaccacagacagaataacacctgtatggggttagtggccaagcaggaggtaacagaggaaagagggaaactccaacagtgctatgaccagaggacccagaaaatagcctcaaaagtaagtaaaggtctcccatagcgagaagtggggcagagttttaatggctcccgtctgagattgagtgcaaagagacttaaaggagggtgcaggggaggccgaggctgcaaggctgtcagaaatacgtaatgaaacatccaggagggtgcaggggaggcccaaggctgcaaaactctcagaaatacgtaacaaaacttccttccagaggaacagcgccccccactaaggacaaaacagggaaagcatccacattgaactgggcaggaacagcgaagggaaaggtcctggggaaaggcgtccagaagaggtggaggtcaaaaaacactgcagaagcagctacacagagcctgcagtttctaataccgcgtggcagcagtagaggagggggccttgaggctggcctgtcaccattgcaaacacaagagcctgttcttaaaaatgagcaacaggctggccatggtggctcacgtctgtaatccaggcactttgggaggccaagacggacagatcacctgaggtcaggagcttgtgaccagcctgggcaacatggagaaaccccgtctctactaagaatacaaaaattagcaaggcatggtgacacatgcctgtagtcccagctacttgggagtctgaagcaggagaattgcttgaactcaggaggcagaggttgcagtgagccaagattgcgccactgcactccagccaaggtgacagagcaagacaccatctcaaaaaaagaaaaaaagaagcaaaaaagagtgttgtttaacatcatacaaagataggtaagaaaaaagaaggccaggcacggtggctcacgcctgtaatcccagcactttgggaggccgaggaaggtggatcacaaggtcaggagatgaagaccatcctggccaacacagtgtctctactaaaaataccaaaaattagccccgtgtggtggcggcgcctgtaatcctgctactcgagaggctgaggcaggagaatcacttgaacctgggaggtggaggttgcagtaagccgagattgtgccactgcgctccagcctgggtgacaagagtgagactctgtctcaaaaaaaaaaaaaaagaaaaaagaagatgatctgaatagcattgcagcagtgaaggtgctccagacacacaggcccacccagcaggaaacactgttccataatatttcataacaagataaaagatactcagaagatgacggaagctgtgaaagaacagcataaatcagaaatagaaaagcccaggccaggctcagcggctcacaactgtaatcccacctacttgggaggctgaggcatgagaatcacctgaacctgggtggtggaggttgcagtgagccaagatcgtgccactgcactccagcctgggcgatagagcaagactcagtctaaaaaaaaaaaagcccagaaatgtggtaatcagacaaaaggaggttgtaaaaaattgcctgtggagctcagaaatgaattataaggaaaaaacaatgtttttaatgaagactaaactataagaagtgtacaagtgagtagacaccatggaaagtgcagtatttggaaacagatgacagaaaagaaaaaagcaaacagagatgaaaaggcgttctgacaaattgaatatggcaaagaagactgaacttacatacagctgatgaagaggcattttgacttgggccaggcgcggtggctcatgcctataatcccagcactttgggaggctgaggagggtggatcacctgaggtcaggagttcgagaccagcctgaccaacatggtgaaaccctgtctctattaaaaatacaaaaattagccaggcgtggtgtcaggtgcctgtaatctcagctactcgggagactgaggcaggagaattgcttgaacccgggaggcggaggttgtggtgagctgagatcgtgccactgcactccatcctgggggacaagagcaaaactccatctcaaaaaaaaaaagaaaggaaaggcgttctgacaattgaatataggcaaagaagatccaacttacacacagctggagtccctgtttccatcatctgttgctgcgtgacagatctccccaaacttgaggtccccattcatcaccccttgtgtttctgtgggttggctgcgtgattctgcttttctgaccgaggtgccctcaggtggtcacagccccgtaacatctagaaacctctgatggtccgcgtggccttccatgtccggcagttcatcccaactgtcagctggggctccttagttctcctgcatgtgtgtcatccaggaggcctagcatgtgcctgtagtcccagctccttggaaggctgaggctggaggatcacttgagcccaggagttgggtgctgcagcgagccatgatcatgccagcacgctccagcctgggcaacagagtgagaccccatctgttaaaaaaaagagagaggccgggcacagtggctcacacctgtaatcccagcattttggaaggccgaggggcagattacctgaggtcaggagttcgagaccagcctggccaacatggtgaaaccccgtctctactaaaaatacaaaaattagctgggcatcggggcgggcgcctgtaatcccagctactcgggaggctggggcaggagaatcgcttgaacccgggaggcagaggttgcaacgagccaagatcacgccactccactccagcctgggcgagagagcgagactccatctcaaaaaaaaaaaaaaaagagagaaagacaaggaagtggggaggagaataagggggaagggaccccatgagtacagaccaggaacgaatgagttctgcacccctctctcacctcccccaggtgctgaccccaacccttcagagccctgctccccctgccccggctcctcctgccccgtcccccatgccttgccattctccttcagcctggctgccctgtcccccatgccttgctggtgcccctcagcctggctgccttgctgggccgccgtgcatgaagagctgcttcttggtggctccctgctggccggacccgtccctcccaagctgagccaccagcgcgttgagtagcagccctgtttcatagcatatctccccttctgtgcaaaatagtcactggaacggggagtttcatttggcataacgtaaagtacacattccggatttaaggttcccaggagaaatagaagtagcaactcccacagtctccacaggctgaaagggaaggcgtctccctgctgtggacttgccacatcgtgctccagcagccacttcttcctaacccctccctgtttaccccccagatttttcctctgttccgtgcgctaggtgcaaacggcctcctcattgagtatgaagacatgtttccctacgagggccctctgaggctgctgagggccaagtacgcctacaggtaacactgcccgtggcaggtacaggggcgcggcgtgaaagcggggaagggggggttccgcagggcaggaggagcagcaacctggaggtgcgggtggcacagtcaggaactgaacagtggtgggtacattccttttttgtctttttaaattcatctctttaattgtatgaaaacaaagtttcatttcaaacattcactggagagaattttgaaacatttaaagggaaagtaagcatcagcagcgccccctacagggaagagctgcagttcctgtctctgtcctgcaggcgtttcttctgttgatgggagaaggctggactacagaaggttagagaaggttagagaaggttagagaaggccagagaaggaaggccagagaaggctgggctagagaaggctagagaaagctggagaaggctagagaaggctggagaaggctggagaaggctggactacagaaggttagagaaggccagagaaggctgggctagagaaggccggagaaggctggaggaggctagagaaggctggaggaggctggaggaggccagagaaggctggagaaggctggagaaggctggaggaggctgggctagagaaggccggaggaggctggaggaggccagagaaggctggagaaggctggaggaggctagagaaggctggaggaggctggaggaggccggagaaggctggaggaggctggaggaggctgggctagagaaggccggaggaggctagagaaggctggagaaggctggagaaggctgggctagaggttagagaaggctagataaggttagagaaggccagagaaggctgggctagagaaggctggaggaggccagggaaggtcagaggaggctggagaaggctggaggaggctgtagaaggctgagctagagaaggctggaggatgctggaggaggcctccgcgcagggaggggctgctcttcaggccacagttgagccttgagttagagaagagaagaattaaaggggagagaatcaaaatcaataaaatcaggtgtggtggagatgggaggcccctgcttaatgctaaaatcacaggtctctgtgaaaatcaataacggccccaaagataaatgcacaatggacattaactggccaatcccaaaggaagaaacaaaaaaggccaataagcatataagaaaatgtgaaggccaggagcagtggctcacgcctgtaatcccagcaatttgggaggccaaggtgggcagatcactggagctcaggagtttgagaccagcctgggtaacatggtaaaaccccatctctatgtgaaatacaaaaattaggccgggtgcagtggctcacgcctataatcccagcactttgggaggccgaggtgggtggatcacttgagctcaggagttcgagaccagcctgggcaacatggtgaaaccccatctctacataaaatgcaaaaaatagccatggatagtggcatggggctgtagtccaagctactcaggaggctgagataggaggatggcttgagcctggtgttaggtttttttaaagggaaggcgagggttaaagaaagacagagagagagagggcgtctctacagcaacagaggtatagtgcagaaacctacagaggggggaccagcttaatgccagagcccaccgccgcttacaggctggggtacttacaggcctggacgggaggggtttgggcagtagggcttctgcctgggaagatgttgagagatgttcccatgatgaggcagttgggtccttgttcccagcagaatatgatcaggatgttccttcagctgggcctttgcccagcaaggtatgttcgggatgttcctgggccgtgtggtcgggtggtcgggatgttcctgggccgtgtggtcaggatgttgggcaggatgttcctcacagcccaaaccccgtggaatgtttcacttcaacctgggtctggaaaacagcagggggcttacaaaatggtgcagtttggattaacacccaggacccagaggctgcagtgagctgagatggcgccactgcactccaacctgggcaacagagccagagcctgtctcaaaagaaaaggaaagaaagaaagaaaatgttaaaccctcatagtactcaaatcaaagaaactaaatcaataatgcaacaccatcctggctaccaaactggtaagccttttttaaaaattataagacttgggctgggcgctgtggctcacgcctgtaatcccagcactttgggaggctgaggcaggcggatcatgaagtcaggagtttgagaccagcctgaccaacatggcaaaatcctgtctctaccaaaaaaaatacaaaaattagctgggcgtggccaggcgcggtggcttaacgcctgtaatcccagcactttgggaggccgaggcaggcggatcacaagatcaggagatcgagaccatcctggctaacacaggtgaaaccccgtctctactaaaaatataaaaaattagccaggcatagtggtgggcgcctgtagtcccagctactcgggaggctgaggcaggagaatggcgggaacccaggaggcagagcttgcagtgagctgagattgcgccactgcgctccagcctgggcgacagagctagactccgtctcaaaaaaaaaaaaaaaaaattagctgggtgtggtggtgcgcacctgtaatcccagctactcaggaggctgaggaaggagaattgcatgaactcaggaggcagaagttgcagtgagccgagatcgcgccactgcactccagcctgggtgacagagcaagactctgtctcaaaataataataaataaaataaatgaaaaattgtaaagactgtgttgatgagaatgagaaagaggaaaactacctgctgatgaacataatatgacatctgttctggaaggacttcggttccatgtgtcaaaactccaaaatgcctgcaccccatgcagcccacatgtggttagaccagaagtgatgaacggtgagccagggtgttggcctgcaatgagataatcaggtgcgatgagatgatcaggtgcgatgagatgatcaagtgcgatgacatgatcaggggtttgcattttcttcatactcttctagttttcttcctacagtgaagacattttgtcttttgatgtgaaaaagtaaagtaccagggttccttcgaagcttgaaacaggaatgtttaaagactttatgtaactcataaatctatagaacggattagcctaagatggttcaaacacatacaaaaactagaaatagcttttttttagataaattcataaatgacagctcatgtaaagcttgtgaaaaacgaagaggtcgacccggggcagtcagcccttcccaggatgtggcccttctgcagaggacgggcgccccaggattgtttcaggttgaggaccctgtggtggacctgccctcgggcagctgctgacccggctctggatggagtgtggcaccttctgtagcatttttatttttttttgagacagagtcttgttctgtctcccaggctggagtgcagtggtgcgatcttggctcaccgcgaactctgcctcccgggttcaagtgattctcctgcctcagcctcccgagtagctgggattacaggtacataccaccaggcctggctaatttttgtatttttagtagatacggggtttcatcatgttggccaggctggtctcgaactcctgacctcaagtggtctgctggccttggactcccaaagtgctgagattacaggcgtgagccactgtgcctggccttgagtagtttcttgtaaaatgtgatgacttcattctcttgtcgtgggttgaaaagcgaaccattacttgaggacgtgctagaacatcatcttcccaaattttggagcaggtacctttccagaaatcaggatacctgtcaagctttgtggagtttagggccttactgtttcccggagagccccccagggcctgatgaggaagggctgggggggtgggtgtggaagtcacgtgctgctcacatgaccctctctctatgaattttgtctctccagcccctctgaaatcaaagagatcttgcatctggctggactcaatgagctggaggtgattcccttggtgcagacatttggacacatggaggtgagtggcagaaatggaagttacctggtgccaggtgtggggtccaggggctgcaggctgggccaggcttgtgcccaggggtgggtgcagcgggcccatggttggggtgcaggcagcgcagctcagcacaacatggaaaggcctttggtctaggaagtccctgcctgactcggccagagctgcaggttggggctgcctgtctgcctgaggaatggaaggaaagagccagaaaaggggtcctggaggcagtttcctttttcacttgtattcatcagaatattattatgtgaggtaaaacacagtattagggaaagaaaaggtgcttttcaggccaggtgcggtggctcacaccagtagtaatcccagcactttgggaggccgaggctggtggatcacctgaggtcaggagttcgagaccagcctgaccaacatggcgaaaccccgtctctactaaaaatacaaaaattagccaggcatggtggcgggcacctgtagtcccagctgctcgggaggctggggcaggagaatcacttgaacgcaggaggcagaggttgccatgagccaagatcgcaccactgcactccagcctgggtgacagagcaagactccgtctcaaaaaatatatatatacacatattctttttcctgtctgcatcaaacaggaagtgatgcggcattaaccaccacaccgatttaatggctcttaggttccatttatttctctaacagatacaccattctggcttctatttccacacaccgcgggtaagaaggttgttttcacttacacatgtcggtgttctgggcgtgccaccggagttccttcccacagctcggtcctccagcctttctagttgattctctccatcgtactctgctctgggacccggcctgcgctcttagcctcctgccacgtatccacagaatgtctctgccaaggccgccagggtcctccaggtcactaagtccagggacggttttagtcctttcctgctgggcccctcggtagcttctggcatccccagccgctctcctgagccccacactttctggcttccctctgcctctgactgcacctcctcgatatccatttgcatttgtctctctgtagctggcggtccccagggctcctctcggtccctgtccccacctcccactctctctctagatggtgccatttctgctcctgctttctctttgtcctcctcttcgtcttcctcttcctcttctgtctgcacctcagcaactccagacctcctgggttacagaccctcatccccagctgcctgctggtcgcttccattgagggccctcctccagcctctggtgtgcaaaccagaagcagaccagccacagtcagcaccaccacccgccacgccctgacccatgttggtcctgctgctgctcctcctcctcttcctctgtcatgcaggcaccacccctgtctaaaccactatggactcaccatgaaactttcctaatgggtctcccggggccactctgcccctccgtgcccctctccccaccacagcaagtcacagcacagccctgaccactcacactcgccatctcctcaaaggacactgctgtcagggcagaagtgatcgccacaaaccaggtggcttaagacaacagaaatgttctctcagccctggagaccagacatccaaaatcagcgtgtcgaagggttggtttcttactgaggaagaccctccatgtgtacatttactattagtataccctttttgtgtgtttgtttttgagacagggtctcactctgtttcccaggctggagtgtagtggtgcagtcttggctcactacaacctctgcttccgagttcaagtgattctcctgcctcagcctcctgagcacctgagattacaggtgtaccccaccatgcccggctaactttttatctttttattagagatgaggtttcaagatgttggccaagctagtctcaaactcctggcctcaggcgatccgcctgcgtcggcctctcaaagtactgggattacaggcgtgagccacggtgcccagcccagtataccctcttggtatactagaaataactgctcaggtgttttgcccattttttttttcaacttgagtttttaaagttctttatatgttctagatgcaagtcctctgatggtatgtaatttgcaggtattctcccccagtgtagagctacatgcttctggtgtcatttctaaaaactctttgtgatcaccagatcacaaagatttttcttgtattttcttctaaagtttaacttctgtgcatttttcatttagatctatgatccatttttagtttggtatttttattctttctccagaacccttgaacatccaagttatttgtcttgagtcacagactcactctgtcacccaggctggagcgcgtggtacaatcacagctcactgcagccctgagcttctgggctcaagcttctgggctcaagcacctcagcctcctgagtagcagggaccacaggtgcgtgccaccatacccggccagttttttttattatttgcagataccaggtcccactatgttgcccagactggtctcgaacccctggcctcaaacagttctcccacctcagcctctcggagcgctgggattataggcatgagccattgcacctggccccattttgagttaattttttttgttcattttcctttttgtgaagagtggggtctcactatgttgctgggctggtctcaaacttctgggctcaggtgatcttcccgcctctgcctccctaagtgctaattttttttttttttttgagacagagtttcactctgtcacccaggctggagtgcagcggcgtgatctcagctcactacaaactccacattccaagtagcttcagcctcccgagtagctgggattacagcgcccgccaccacacccagctaatttttgtcttcttagtagagacggggttttgccatgttggccaaactgatctcgtcgaactcctgacctgaagtgatctgcccgcttcggcctcccaaagtgctgggactacaggcatgagccaccatgcccggcctcctttcattcttacaatatattcatagtagttttcttgaaatatttgataaattctgcatgtgggccctgagagtcagagtctgtgaactggatcctactttccagttcatttgcacatctcaaaatttttggttgagaactgaacatttcagttaatacattatagcaaagctgaatgtttactcttttccccagtggctggtggtggtctttttgttgttttctagcaaatggcctgcatttaacctgcaggacctgcccctggctgtgtgcactcactgatgtctgtgctgagattttttggttcttatttttacattttagcctggcttcctagggtcatccctctgtcttcatagttggtggtcagccaagggtttgggcagaggttgtgctcccacaccttgagcccacagacctcctccccttgccacggggctgtgtgtgggcggtggggggtgcatccctaggttcgcgcagttcccacctggccctcacaggtccctgcacgtgtgtgtggcccccgtcagccaggcctgaggagagtgtgcagcaccatctggctttctgtttccagggtcacccattaaatctgcagccagtcttggctctccccagcagggactgcaccctctggcaagcggaagacagggcctcttctccagttgctgcttctactgacagcgcccccacaaggggtgggtttttaacccagcctcaagttaagtctgcccctttggcagcaaagctgtggtttccacagtgagggggaagggggcagtgagtagccctaggccgaggccacagagtctctgttcttaggcaaagttagagtggtctttcatagataaacatttttctgtttttttcttttcagagacagggtctcactctgtcgcccaggctggagtgcagtggtgtgatcatggctcactacagcctcaacttcctaggctccagtgatcttcccgcttcagcctcccaagtagctggaccacaggcaggtgccaccacacctggccacttttttttcttaaaccgatttggtttttaaaaaatttatggctgggtgcagtggctcacgcctgtaatcccagcactttgggaggccaaggcgggcagatcacaaggtcaggagatcgagaccatcctggctaacacggtgaaaccccgtctctactaaaacaaaatacaaaaattagccgggcgtggtggcgggcgcctgtagtcccagctactcgggaggctgaggcaggagaatggtgtgaacctgggaggcagagcttgtagtgagccgagatcatgccactgcactccagactgggcggcagagcaagactccatctcaaaaaaaaaaagaaaaaaaaaaaaaaatatatatatatatatatatatatatatatatatatattttttttttttttttatatatatatttttagtctgggcgtggtggttcacgcctgtaatcccagcactttgggaggccaaggaaggcgaatcacttgtggtcaggagttcaagaccagcctggccaacatagtgaaacgccatctctactaaaaatacaaaaattagccaggcgtggtggcacatgcctgtaatccccagctactgggaaggctgaggcgggaggatcacttgaacctgggaggcagaggttgcagtgagccgagactgtgccactgcactccagcctgggcaacaaagcgagattccatggggtttcaccagttgtccaggctggtctcaaattcctgagttcaaacattctacccacctcagcccccacaaggtgctgggattacaggactgagactctctgcctggcctaatttttttgtattatctgtagatttgaaacagaagccccaggtgggcagaaggagatcagtccagctcctccgcccccaacgcgaacttctctgtctctccgcagtttgtgctgaagcacacggccttcgcccacctgcgggaggtgggctccttcccctgcaccctgaacccccacgaggcagagtccctggcgctggtgggcgccatgattgaccaggtcctggagctacacccaggcgcccagcggctgcacatcgggtgtgatgaggtgggtactgtcaccccagctctgtgcaggacactctcccctatcatggcttgtccttttaaataggaaaatcttccaggcactgaggcctagagacaggcttgttgttcccctcagggcaccccatccaacatcttctccgagtggatgggcggcctggcacgggacagcctgcggagcccgagggaggcaccctcgtgtcagacgcgtccaacatcttctccgggtggatgggcggcctggcacgggacagcctgcagagcccgagggaggcaccctcgtgtcagacgagaccaccccgggcggctgggctggcggaagcctgtgggtgatgggcaggttcacgccccaggaccagcagtgagcataagtcagggtgtaactcgagggacacccttttgttgctgagaggaagttctgcatttggaccctgaagcacccaatggaaaaggtggtccccagggggtgccagagatgtgccccctccaacccagtgagcccccacccttgcccctcctgccactcactggactccaactcagtcagggcctgggcaggatgtggaactgaaaggggcggggttggtgcccacggggctgggaggttctgcagggctgtggctcacagggaacccgagctgaacattttagccccagaagtttcctttttttgaaggaaacctgagtatgtaaaatacacttaagctttaccattctaaccattttaaaatataggctgggtgtggtggctcacgcctgtaatcccagcactttgggagaccaaagtgggtggatcacctgaggtcaggtgtttgagaccagtttggccaatgtggtgaaaccccgtctctactaaatatacaaaaatcagccgggcgtgatggcgggcgcctgtaatcccagctactcaggaggctgaggcacgagaatcgcttgaacccaggaggtgaaggttgcagtgagctgagatcacgccactgcataccagcctgggcaacagagtgagactccggctctaaataaataagtaaataaataaataggccaggcacggtggctcacacttgtgatcccagcactttgggaggctgaggcaggtggaccacctgagatcaggagttcaagatcagcctggccaacatggtgaaaccccgtctctactaaaaatacaaaattagccaggtgtggtggtgggcgcctgtaatcccagctactcaggagactgaggcaggagaatcacttgaacccaggaggtggaggttgcagtgagccgagattgagattgtgccactgcactccagcctgggcaacagagcaagaccctgtctccaaaataaataaataagtataaacgtcagcacctcttccagacattcatggtgtgggcaatcaccccagggcaagccccgcacctgcccccaggccccggcgaccacggtctgcttcctatctcggtggatttgcccgtctgggcattccacgggtaccgagtcacacagtgtatgacctgtgctcctccgggctgtcagctgccagagcttggctgtctgctgaagccgagccgtgttcatggtgggggatgctgccctatgctggtccatcatgggggatggacccctgtggtctctgctttgttggctgtgagaagagctgctgtgaacattcacaggaaaccttgagtagaagttcagggctcagtgaggaagacagggacacgctgggggtggtaagcaaaggctccgagcccctccctggcctcctccccacaggcagcggcccctctccgtcagggcacggcgtgaaccccggaccctcccaccggtgtgcacggctgccaaggcaaccccgtcctgctccttccttgcaggtctattacctcggagagggggaggcctcgcgccggtggctacagcaagagcagaacagcacggggaagttgtgcctgtcacacatgcgggcggtggccagcggcgtgaaggcccggcgccccagcgtgacacccctggtgtgggacgacatgctccgagacctgcctgaggaccagctcgcaggtcggccaacagggctgggggagggggtgggccactgaactgcccaagacctgcggcttcaaagaaagaaggtgctgtaggaagtgggccccagggtgagccccagccccgcacagacccgccacaaccacctcctgcatccccttgacgccaggcctgagtcgtttccctagaagctgtggaggtttgggcaggagagcacaggcctgcctggtggcccagagggcttgggagtgtccagcactcgcagcagcctcctccaaggccatccctgctgggactgggggccgaggttcccgctggctgctcctccagcccctgggccctgctcgctctgcctgaggctttgggacgagctgctgagcgcctttctgggccaagaggtggtactcagacacctggcctggttccacacagagccccgaggctcagtgagctccatagcagagctgggagccagggtgtcctagggccgtgccggcctggcagcttccacccatgcatggccacatagatgacttagagtgacctccattcagccgcgtgctccagctgtgcctgtggctcatggcctggtagagcagcagtgggagcatggtcgctccagcgggcgctggcttggaaaggcactgtgtgtggttgtggcattcattgtcaaaacccagcacggtgccaagtctgtcttaaaaaggtatctgtgctcacactttcaagcaaaacgagaacaggtgggtccgaggggctgagagtgtggtccaggtgtctcaccaacctcacgtccgctctgtctgcagcgtccggggtgccgcagctggtggagccggtgctctgggactacacggccgacctggatgtgcacggcaagggtcagtgccaagttgtggggggtgtgttgtcctggccatgtgcctgggaaggccatccctggccctgtgaccctgcagccggaactgcccagcctggagcctgcacgggtagaggccagggcacagccccagcagaccccagcccatggtgcctcgggacggccaccgtgcaccggtgcctcacctccctccctgttccaccagtgttttcctagtgagcaggtgaaccaggggccacgtacactctggagtctccccgactgggacccgggccggccgcatacactctggagtctcctacactgagacccgggcctggctgtctcaggcggctcccatgttggctctgggtacagccccgggaggcgtgtccagggccgtgttggccgcctcccctggagccactcacctgtttgctttctcacccagtcctcctcatgcagaagtaccggcggtgcggctttccgcagctgtgggcagccagtgccttcaagggtgccacggggcccagccaggccgtgccccctgttgagcaccacctcaggaaccacgtgcagtggctgcaggtggcgggcagcgggcccacggactcactgcagggcatcatcctgaccggctggcagaggtaagtcctggccagtctgtcctcagagggtccagggcagctctggtggccaccacgtcggcctgtgcagcgtccgccaagggccttcccaggttggtcaaaggggaagcagcccgggcctccaagaggagctgcagaaacagccacgtggggttgggccctgcacgccagagcggccgctgagggacgctgctcccgtgttcagggtcacgaacacgtggcccccagcccccatgctacccgtgtgcgccgcacctgaggctgtgtgtgtgtgtgtgtgtgtgtcttgcttgtggcacgaggaggggtttcggttctttcaggatttcactctgttgctagaaatgccgtctcaattcggaccccacgagaaggttcttgggtctcacacaggaaagaattcaaggccaagtgtggtgagggagggtcactgaaaggtgcccagtgacagaggtggagccctcggaaggccagcataggcgtgcccagctctgttttccgtttttctcatatcagggtcttgtctacgtaaacactaagctgtgctacctgtgggtgggccaatagtgtgacagaatttattactctaggggctgagtgcggtggctcatgcctgttatcccagcactctgggaggctgagacgggtggatcacctgaggtccagagttcgtgaccagcctggccaacgtggtgaaaccccatctctactaaagacacaaaaattagcctggcgtggtggcacgcgcctatgatcctagctactcgggaggctgaggcaaggagaatcacttgaacccaggaggcggaggttgcagtgagccaagatcacaccgctgcactccagcctgggcgacagagcaaaactctgtctcaaaaaaaaaaaatgtattactctatgatttaaagaaaactgtcctggacatttcagtgtgtagcctatggaagcctaactctggtgacctagaaggcacatgctgtcgtgggtgtggggatgccaggactgtcggctgttgtaggagtggcccctgcaggtatctaagcacttcctcagctgtaaaaatcctgtgactgtgggtcctgcctggcaagaatgggccttgttagtcccatgaaggagctgggcctccgtggcatcaccctggcgctcccaggcccctgctcccctgacgacactgtgtgaaaagcagagctaagataaacccctggtcgccggccaagtcctgaccttgggtctcgtctcaagttagagggttggggggcaggtggcgcaggtgatgtgggctaggcgaacggctggaggccagacccaccaggggccccgtgccctcacccacaaagctcagattgagatggagtcaagaatttcatggtggggaccgcagagcctggtgggccagcctgctagaggggcagctcacagccaccatgcatgtccggagctggcagcggctctgcagaagcttctagatagttcccactgtcctgttgggatacagctctgtctgcataaaccaggatcgtccatagagcggggcgaggctcctcctcccccagagcagcggcgcatccttcaggcgagcctggggctgtggcgtcaggcattgcccagccttcgcctgtgctcacacctggggcagcgtctgtcacccacctcacagctgaagaaactgaggcacgggcaggtggaggcaccctacccagcagtgggaagcccaggccaggccaaggccccccagccctcgcttgggacagatgctgcccctgacctgctgcctgccacgcctgatctctcgccctcctcatggggccttggggaaaagctgccacccccaccagccagacaggaggcagccgagggagagggtggggcaggaggggcccggaggccctaggaggggggcgtcaagggcagcccccagaagcaggagcccttttctcagaggccagaggtgctggggggagggacaacgaccggccacccacccaaggtccacccagaattcccatggctccggagagcattgcagcaaggaatccccacgctcttcacttgtccggtttctagaacggagttgacatgagagccctgccgcacagaacctgtcttggaaaccctgggccccatgggttgagggggtcgggctgcccccagcgctgatgtagcctaaggccctggaacaacagcagggacgtccgaagtcagggcgcctgcgtcaggctgctgggggcgggctgcggagctaagcgcccctctcatggacccaggtacgaccactactctgtgctgtgcgagctgctgcccgcaggagtcccgtccctggccgcctgcctgcagttgcttctacgcggtatgtctggtctggccaccccaagccccaccggcccctccccgaaagacccggagggcaggaggccaagcacccagtgctccaaccaccctgctggactgtggtggtcctcacagtcggaggatggtctcaccgccccagctcagccacccacctgccctgaagtccacccaggctgggcctgtgtctgggtctccaggcctaagcccaaagcaggctggagagtgacgcgggaggcacccctcagacacagtgaatccgcagaaatgcacgcaggtcggaggtggggaacggctccacctttgctgcacacacgtcctgcccacctggccgagcaggtgtggggctcaggcgcccggccctggaaggccccgcaccctggacccagcactcacacttccaggtctcctgagggagcagcgggacccatgggcaggggcaggcaccggggaaccccttggggtcggcagggggcttggccagaggagctgtgtgtgtggaaactcgcaggccacacgggaaattagcgactgcgtggtgctgatgcagaaagaaaaatggccgagacgcgcggagagcgggacccgcaggcgcggcggcccagggacggggacgcggccggtgagaggacgcagaatgagatcagattgacttctcagttgctgactctcaactgcttagaaaggggcagaaacgataaaaacagacacccctgtaccccacactaaagagctgtgttaatattgacggtatttgcagtgtcccttgcccacggccccatccgccacccgtgactggggcacttccctcctgccctctggccgtcagcctcttgcagcaagcatttccatgaacaccaagtcggagattcgtccacgctggtgcctgcaggcctcatgggtttgtttcgggtgctctagaatattccatcgattgtgtaaaacacagtggcaaactctgcgtgagccctggacacctgtgtgggtcgggctgcgcccagcaggaagagccacttgctgtccgggtgttgctgctggcaacacagtcttacttctgttttctgatttttaaaataaggaacgtatttcacgtgtttaaagagaagcagcaggcccatttgcccccaggtccccttggggccggcacacgcggggctgggcctggccagtggctctccattgccgcccgcccactgccccagtacctaggcctgcaggtcccaatgtagccccctcccctcctccagaggcccctccaaccgccccgctcatttgtgatttcaggaggatttgatgaagatgttaaagcgaaagtggagaaccttctcgggatttccagcctggaaaaaacggaccctgttaggcaagcaccctgcagccctccctgtccccttcttcccctccccttcccccgcccgtggagacagctgttctcagcagggctctccgcagggagggggccggctccttccctggcagcaacatccttgcccttgtcacacaagtcagcctccatctgcgcagctctgtggatgcgctgctggagggcaacaggtgagcgtgtgggttaggggcaggtgtgggtgaggggggcaggcatggggcgggtgcaggtgagggggcaggtgtgggtgggaggcaggtgcgggtgaggggcaggtgcaggtgagcgggcaggcatggggcaggtgcgggtgaggggcaggtgtgggtgggaggcaggtgcaggtgaacaggcaggtgtgagcgtgcaggtgtgggtgaggggcaggtgcaggtgagcaggcaggcatggggcaggtgcggctgaggggcaggtgtgggtaagcgggaaggcatggggcaggtgtgggtgggaggcaggtgtgggtgaggggggtagggacaggtgctggtgaggggcaggttcacaagtccccccactcccaggcacaggaggaggcagcctcatccttcacaaagactttctgggggacataagacttagaaatgtcaaccccattcttaaacattttctgtattactgcaaagccgccccacggctgccttggtagcccgcggcacacccctatgtggatttgccccaggtatgtcactggctggttcagcccctaccaccgccagcggaagctcatccacccggtcatggttcagcacatccagcccgcagcgctcaggtgaggccctgggctcttataggccgtgcagccatgggttccctgagaactgctgctgttgctgacatgtccctcaactagagagcagagggtgagcccctagttgtaaaaggccctctggtctcagatgtgcagctgtcaccgacttgttcctcccgacatgccgatgaggtagggtcagtagccccatttcacaggtgaactgaggcacagggcagtactgaccatggggctgagggcaagtcccaagtgtgcagactgtgcgttcatggcgccctcacctgcagcctcctggcacagtggagcaccctcgtgcaggagctggaggctgccctgcagctggctttctacccggatgccgtggaggagtggctggaggaaaacgtgcaccccagcctgcagcggctgcaagctctgctgcaggacctcagcgaggtgtctgcccccccgctgccacccaccagccctggcagggacgttgctcaggacccctgaggggagagctcatgccagggggctcctgctggaggctgggggggctctgcactgccaaatggcctgggcaatacgggcccacgtgggcgtcgtgccctctggcccagcagtgtcttgcccacactcagttcctgagggccctgggcagcccctgggggagagactagaaaacacagaaggaagcagcacagggagacccgctttgtgatctgcatgtgtgacactgattctttggaaataaagagtggaagctgcaggtgacacgtgaagggttatttatggttatgatgaccctgtcctgcaacgagggactggcagccactactgaggaggagggtcccatctctctcctgtcggctttcaccgaggtcacagccagacgtggggcaaaggtgttccctgtcctacccagccattcctgggcctgccgcctaggggctcacagggcccaggagtccccagctcacaggccagggcatcaggccaggcgcgctcggtgcacaccgcacctgggaggacctgggtacactcaggagaccaagagcactggcgggtcaggatggttggcgttcagctcctacggggtggggagaagtctgtagccgagagcccagccccctcctgccaggtcttcccaggttcgagagaggctggaactcaatttctgcagaaaatctcccagtttttcctgtttggttagtttttttacaaagacaggatcttgctgtgttgcccaggctggtcttgaactcctggcctcaagcaatcctcccacctcggcctccgaaagtgctgggattactggcatgaaccactgcgcccggctggagctcccggtttttaagcactgcacgatactagaagagctgaccttttttctggcctcacagcttatgctgaagctgagtgtgaggaacagagagacctttctgtgacgaccgctggggcagagtggtctatgcgccgagatcctggcatcagcaagggaggcgggtcctcggggaggggcagcttccacagtgtggctgcagcgtgcacagccaggtaggccctggatgttcacccctcactgcccttggggaagcacctgaccgctggggatgtccaccagggagaggacgctgtgtcggggacaacatgcagcatcagcacccacaagggcccggcctggccccgcctctccactcgcccgaggtcttgctgtggcccaaagcaggagtccagggctggcgagacctccggctgcagaaaggcaggcccaggcctcacgatggagaaagtctggatgtcctggtctggcctgctgtttcatgcagtgtgcaagcagcagcatgagcaggcaataggccaactcggctggaggcaccaactgaagccaaggccacgggtcctgtgggcggtgcacgggctcaggcacaccgggaatgtgccacgggtcctgtgggcggtgcacgggctcaggcacaccgggaatgtgccacgggtcctgtgggcggtgcacgggctcaggcacaccgggaatgtgccacgggtcctgtgggcggtgcacgggctcaggcacaccgggaatgtgccatgggtcctgtgggcggtgcacgggctcaggcacagtggggctgtcagctctggcttgcagggtcaccggcctcactgtcgctgctctgagacagctctgtggggctctcaaggcagtgcagctccaggaagctggtgatgagcttggcgatggcttccacatcactgggcgaggccggcaacgggaggaaggtcaggtcacctcggcatagggcaccgtgagaccccacagcagtctcctcctcgaccacctacctcccgcagaccctggagctcccaaactggacccagcacttcctggcctgctcccagcctccccgtcacagtggggctgcccctgagcctgcacacgcttcccgtgggcccctctgtgtcccgtccacaaactcatctcctctcccagctgccccatagctctgggcagtcaggaacgggagtgacctgctacggctgcagctccggccagatcaaagtcccacagccttacctgcggtggcccatgactgcactctgcgtgagggggtgggagaagcccgtcgcaagccggagcaccaccatgtagcctttcccgaagtaccggaccttctcctcctccacgctcacatcacggacatcatggagcaggaccaccactgcggggagacggtcagtggccgagccatccccgcccacacatgctgcccggcagtcgcaccagcgccactggcatcatcgaaagcgacagccacacttggttggcagcaaaagcatttgctgtttcctgcctgaggctgggccccggaggactgctgtggccctgaaggcagtgcagggtcctctgggtgggaaggacgtgcccgcggtgcaggctggcgggtcacatgcacagcccgctggttctcctgggagtgccgactgcggggacccgctcagcgcgaggccatctttacactgcactgttcctccaggtctccccaaggttggctgctgagccagggccaccctgcagtttcccgtggcaactcagggcagccacctcttcgggtactggggcggtcccaatggctgtcagaaaacggcacagctgcctcccacagcccaggccagccctgcaactgctctccccaaagccacaggtgacctggggccaatgccctggccaggtccctgcagggatccaggaagcagcctgtcagaagtgcagcattgcggcactaaacccaagactgcccagcaactctggtcgccagaatctgtcccctctggggctatgcatgggcggccggaccccggggcctctgtctgtctgtgcggcagcatctacaggaaactggtactgaccacagctgggccagtgcccaggctcaagggtggggagttcctcggaccatccagcccctactgcaggcccagtagaacccacaggaaagctggagcagcgccaaggcccgcaagaagccaggtggccccactccagaacgcccacgggctgccatggctctccctgccccgtcctgtgacctgccgctggggccagactgcacctgcggacaagtggctgccaggcagacgggagaatgcagctaaacagaggctgcccgagcccgggtgggccagacccctgctcctcagacccctgctctgccagacccctgctcctcagacccctgctcctcccactctccccaggggccaaacctctaaagaacccaggaggctctaggaccctgctgagcaggtgagcaggtggggcgtatccgtgggatcctgcttccagcgggcaggacacaaccctggtcaccaagcaggtgagcttggaccaaaggcacttccaggcccccctctaggccccgtgagtcacccagacgcccaagtgcgccgcctctgtggccgtgtcccatgtccccacgctccccacgactcaccctggtcgtggccagctctgaaaagagtcagcagcttcttgtagaggctgaacgtcttcaaaacaaccttccctgtgctcttgtcgaagatggcttcctggaaaccgacatgcactgaccaccatgaacctccaggaacgggggccccgtggccgctggggcctcacccccaccctcaccagggtggacactcaagaaggggggctggggaccctcccagtcagaacccaaacccctgaagccacaggtgctgctctgtcagagccggatatcggcagccaacccgactcctgttgggaaatggagaggtgggcaggtgcagcaggcgcttgctccaccctgcaggcaaaacaagtgcagggaggcagtggaaccagcaaacgagggcatggaggtcagagggcagcactgggccaggctgaaaggactcatgaggggctccgaggtgggagggccggccacggggaaagctgactcgcatcccattgtggcaactctgggaagaaagcactttggtgaagatagtcatggagagcttctaagagaaaaatgccttcggggaattccttggccaagaacggtcccagatgagtgcaggggccatgtcctgatgaacggagacctccaagcagggaccaacgcttcaggacggggaggcgctaggccacccagggcccttcctcctcctttcattcccattgcaaaaaacccaggagctgaacagccctggactctgtcccgcacccgagccggccttacctcccagtcctccaagttctgcacagccacaaacaggcagcctgtgacgtagaagagcttccagcccaggctatctggagatgggcatagggcgccagcctgtgagctccagggacatgcccacgggaggccccgcctagcacagcctcccccagacgctggccagagcccacgcttgcaaggaccccctgggcagcttcctgtgctgctgaccctgccctggccactcaggacccacacgcggcacaccccacccagctctgacccccagagtccacgtgagagaggcaggtggggcgcacagggcctctgcccgtctgggcaggcccagtgattgtggcagggtgggaagtacacctcatcccacagctggatcttagatcctcaagagcatctctccgggaatatttgatgacccaaaaacacagaagacttaagaagtgaaatgtggccgggcgcagtggctcacgcctgtaatcccagcactttgggaggccgaggcgggcggatcacgaggtcaggagatcgagaccatcccggctaaaacggtgaaaccccgtctctactaaaaatacaaaaaattagccgggcgtagtggcgggcgcctgtagtcccagctacttgggaggctgaggcaggagaatggcgtgaacccgggaggcggagcttgcagtgagccgagatcccgccactgcactccagcctgggtgacagagcgagactccgtctcaaaaaaaaaaaaaaaagaagtgaaatgtgggctgagcgctgggcaggatgggcgtgcggaagaacagcagcgcatggagggcgcggtgcccgccagcaatcaaggggcagaggtgccgatcctaaaggccgccccatggacagtcacaaatgacagtttttccttcttttctctgttttccaaacagctgagacagtcatgggggggtggggcggggggtgctttacctccgctgtagtaggcagcagccaggccaatcgacaagattcctatgaagagaaagtgactgcctgcctattgatcccggtaagaccccacctccctggtgcagcgggaccaggagccacagcccctgatgagcaggcccttcccactgtaggaacagctgtggtcaggggttacagaccaccaggttcagagtaggggaaacagccaggaagctggttcaataatgcagtatagctgggcgtagtatcacacacttgtaatcccagctacctgggaggccgaggaaggaagagcgcttgagctcaggagtttgagaccagcctgggcaacataacgagacctcattactaaagaaaacaaaagcaaaacacagtatacgctattcacagtatttactagacacatctgctgtgtgaggctccataactgacacgggtgttactccagtagcacgtggtgaggcctgaagactgtgcacaaagaaattacaacacagcgtgtcatgcaaaacacacaggaggctgtggcgtgtcacaaaaaaggtgggccccagctgctgaggtacagccagcaccactcctcacacggtgtcccgtcaacacaagtgcagctgtccccaagggtacaggaccctactggtgggtagcgatggaggacgggaggctaagtggactgtgagtcctacgaagaggtctgaggaccagggaggaggagacatgggaacccacgatcacccatcacgtggttagtggactgtgagtcctacgaagaggtctgaggaccagggaggaggagacatgggaacccacgatcacccatcacgtggttagtggactgtgagtcctacgaagaggtctgaggaccagggaggaggagacatgggaacccacgatcacccatcacgtggttagtggactgtgagtcctacgaagaggtctgaggaccagggaggaggagacatgggaacccacgatcacccatcacgtggttagtggactgtgagtcctacgaagaggtctgaggaccagggaggaggagacatgggaacccacgatcacccatcacgtggttagtggactgtgagtcctacgaagaggtctgaggaccagggaggaggagacatgggaacccacgatcacccatcacgtggttagtggactgtgagtcctacgaagaggtctgaggaccagggaggaggagacatgggaacccacgatcacccatcacgtggttagtggactgtgagtcctacgaagaggtctgaggaccagggaggaggagacatgggaacccacgatcacccatcacgtggttcaaaacaagtacaaaggaaaatatggtgacctcagaaaagctcatagagtatattaaatacgctgggtgttagtgattaaaaggggacaaaacagacatgcattatctgtaaaaccaagtacaccagatagaatttgaatggatacaaagaaacaaaatagccattagatttcaaggtaatagaaaaaagagaaaatattttgtttcattttcatcctttttgaaagtcaggcttccggttctggggttctggggagggacgtggagagccttaccaaccagcagggaccaggaccggatgcctggagccctcttcagatggaggcgggagctggtgcgggtctccacctgcaggtacatcccgagagggcagcaccactctctacaggaggaggggtctgggaacagacagaggcagctgagcccttgggcctgcacacaggcaggcgcccacgccatcaggcccagtctggaggccaagagcaggtcccccaactaagtcacctgcagccccagacaccatcagccagtctcacctggtctctgtggttgggcacgtcactggatcccccagagaccccgtttcctgtgtaaggaaggcccttttccgttcacagcgacaccgactgcgcgggggctgtttcccgctcagactcacgagctacagctgcatcaccacctgccccgtcctgtctggaaaccttatgtcctgaggccgctagcccccagcagcctttaagcttctagcatctgtgggcaccccctctcccctgtgctggcctccaccaagaaaggaactgaaagtcccatcatggcttccggccgtactggctctcgcactggcatggaccaacgatctcagctctctctctgccctcctccacctgctgaaagttcagactgcacagtagagggtcccaaagcggccagaaccgacgagtcaccaaaggggctaatcttccacagcggagttccgcacgggcgcagcagccctgccacttcaccgtacgctcccaacactggccccagggaccccgttctggtagtttctcagggctttccctgtgaagtcaaatcaaatttctgacattaagtagggggttcaggctgggcgcggtggctcaggcctgtaatctcagcactttgggaggacgaggcgtgcggattgtttgagtcacggagttcaagaccagccagggcaacgtggcgaaaccccgtctccacagaaaatacataaaacagcccggtgtggtggtgtacgcctgtggtcctagttattcaggaggctgagctgggaggatcacctgaggccgggaggtggaggctgcagtgagcagaaatcgtgccactggactccagcctgggtgacagagtgagaccgtgtctcaaaaaaataaaaaatagtgggttcaaatcacacaaaccaatcctagatgctggtatatgactgggctccctcccgggcctcagttgcctcattgctcccgaaacacccggcattccacatccaaatgcacacacacacgcacactcgcggacacaagcacacgcgcgctggcaaagccgcccgcgccgctagtcgcaccgagcgctcgtttctttgtccggatcgggggcgctcccgccgccggggccaacctgcagcggaacaggcgcgaggccgcccgcgacgggcacggcgggacacggaacagccggcaggcgggcccaggacgcagacccctcccggagtgggcctaagggtgccgggacgcgcggcacggagcgggaaggaagtgcggagcccacccagcccagccgcctaccgagagcacagcggtccccgcgccgcagcagagagacgcgaaccggcgggggcggggccgcgcgcacttccgggattggagcggagccgagccgactttcgggggcggggccgcgcgcgcttccgggattgggggcggggccgcgcgcgcttacgggattggggcggggccgcaagcatttcctggatggggcggagccgagcggatttccgggatccgggcggagccgcaggaggaggcgggtggttcctgctaaagaagccagttttcttgaaaaaaagaaacgtgcggggaaacgtatccgacagcaaagaacttaccaaggactatgaacgtcttgctaacatagaagcgaaactgaagcggttctcattgccaaaaaagaagatttgagcatgaataagaacaggaattcgagtgaatttaaaatcctcagatgctccagtctgtaattcataataatgtattttttaactctgttcacctttggaggatgctggtaagctcaccccagtttgtggcctggttaataaaaggaaagcatcaagcatttgtcctgcctttatgaaatttacagcagagtaaccaaatactgcatgagaagaatttctcattatagaagttttcccgctaataaatgaagaagaaacagtaggattaaaacatcaccctatgaattaacggacctaggcaatgtcatcaatgactgctaattaacatcgcaaaaaggtcagttagatatcagaagtacacaacactatgaagtagtcttgccagaaaaaatttaacctgaatgtgaacaagcttctagagtgaattactggaaatgtggaagacaagactgtactaaaggattctacaaggatacagtcagcaattcgaaacctcaaccatctgaatggacccttccgcttggccaagagcattcccaagttatcctgaaaaactagctcaggcagtgatgggaagggggagacagacatacctcactccctcctcccttttggaattcaggcacacagctgaccagcattcacattaaaacagatcttgaggtggccaggtgcggtggctcacgcctgtaatcccagcactttgggaggccaaggtgggcagatcacgaggtcaggagattgagaccatcctggctaacacagtgaaacctcatctctactaaaaacacaaaaaaattagctgggcgtggtggcgggtgctcatagtcccagctactcgggaggctgaggcaggagaatggcgtgaacccgggaggcagagcttgcagtgagccgagatcgtgccactgctctccagcctgggcaacagagtgagactccatctcaataaaaaataacaaaacaaaacaaaaacagatcttgaagttgacaaagtagactctgtagcaatgacgccaaattccagcctgactctggtataggactacatgacagataggaagccttggaagaaatggaagtactttaccccacattaaatttcttcgacttattttgaaatagccctgcaaagctgtcccttgtgaagaaaatctacattctgtagcgaatccccgttcctttccaggtctttttcctgcttcagggagaactctgataagaagcacttacaatctattctctctgaagcctgctacctggagacttcctctgcttaatggaaatcttggtctccacaaacccttatcttaacctaaaaactcccttctgttgattctaggtctttagacagtaacttaaccttttcaaccaattgccagatagaaaatctttgaatctacctatgacctggaagcccccccacttcaagttgccacacctttctgaaccaaaccaatgtacatctacgtgtattgactgtcttatgtcttccaaaaatgtatgtagcctaaccaccttgggtacgtgttcttaggatctcctaagggctgtgtcgctggcccttggtcactcatatttggttcagaatctcttaaaatatttttcagtttgactctttttgacaacatgggaaatcctacaggcaaatgacctgatttttaaaatgatatatacaaagagaaggatatggatagaacctacaaatttgaaaaatgacaactttaagatcaggaactctgcaacttttttttttttttttttctggacaaagtcccactctgttgcccaggctggggtgcagtggcaccatctcagctcattgcaacctccgcctccccggttcaagcaattctcctgcctcagcctctcaagtagctgggactacaggcacacaccaccacgtccacctaatttttttatttttagtagagagaggcttttgccatgctggccaggctggtctcaaacccctgacttcagatgatccacctgccttggctgcccaaagtgctgggattacaggcatgagccatcatgcccagcttgaactctgccacttctaagtacgcctcaagttatgtcaaaatcaagtttttattttatttatttatttattttagtatttatcaatcattcctgggtgtttctcagagagggggatgtggcagggtcataggacaatagtggagagaaggtcagcagataaacacttgaacaaaggtctctggttttcctacgcagcggtccctgcggacttccacagtgtttgtgtccctgggtacttgagattagggagtggtgatgactcttaacgagcatgctgccttcaagcatctgtttaacaaagcacatcttgcaccgcccttaatccatttaaccctgagttgacacagcacaggtttcagagagcacggggttgggggtaaggtcatagattaacagcatcccaaggcagaagaatttttcttagtacagaacaaaatggtgtctccttggtctgcttctttctacacagacacagtaacagtctgatctctctttcttttccccacatttccccctttccttttcgacaaaaccgccatcgtcatcatggcccgttctcgatggtcactgtctcctcggagctgttgggtacacctgcagaaaggctcccagatggggtggccgggcagaggcgcccctcacctcccagacggggcggccgggcagaggcgctcctcacatccaagacggggtggcagccgggcagaggctctcctcacttcctagacagggtggcggccgggcagaggctctcctcacttcccagacagggtggcggccgggcagaggcgctcctcacatcccagacggggcagccaggcagaggcgctcctcacatcccagacgatgggtggccgggcagagacactcctcacttcctagacagggtggcggctgggcagaggctgtaatcttagcactttgggaggctaaggcaggcggctgggaggtggaggttgtagcgagccgagatcacgccactgcactccagcctgggcagcactgagtgagagagactccgtctgcaatcccagcacctcgggaggccgaggcgggcagatcactcaaggtcaggagctggagaccagcccggccaacacagcgaaaccccatctccaccaaaaatacaaaaaccagtcaggcgtggtggcgcatgcctgcaatcccaggcactcggcaggctgaggcaggagaatcatgggagcccgaggcagggaggttgcagcaagccgagatcacggcagtacagtccagcctcggcaacagagggagactgtgggaagagagaagagagaagagaggagagggagagggagaacaagtttttatttttaaagagagacttttcaatgtcttccgtaagttcatagaaaaagagacttaagaaacatatgaaccaattgtaatatagactattaaaacatactagaccttatttagatcctgatttaaacaaactgtaaaaaaatatgagacaatggggaaaactggacattggctatttgataaaaaaaaaattaagtgattataatttgttcttttttttttttttttttgagacggagtctcgccctgttgcccaggctacagtcatgcaatctcggctcactgcagcctctgcctcccaggttcaagcaattctcctgcctcagtctcctgagtagctgggactacaggtgcgtgccaccatgcccagctaattttttgtattttattagagatggggtttcaccatgttgtccaggccggttgcgaactcctgagctcaggcaatcctcccaccttggcctcccaaagttctgggattacacgcatgagccaatacacccggccgtaatttgttctttcaaacatattacacttatgtttttatttcatttttttttttttgtattttagagatggagttttgctcttgttgcccaggctggagtgcaatggcatggtgctggctcactgcaacctctgcctcccaggttcaagtgattctcctgcctcagcctcctgagtagctgtgattacaggcacccactatcacacacagcaaatttttctattattagtagagatggggtttcaccatgttgaccaggctggtctcaaacacctgacctcaggtgatccacccacctcagcctcccaaagtgctgggattacaggcgtgagccaccacacctggccagttatgtttgtaaaacattaacaaaaaagctatacaaatgacaacctaaaattatccttttatttaaactgaagttgaggggagatattttctgagagatgctgacttgaatttgagtaatctagagggttaagacttccagaatttcattgttgcatttgtaaaaagctatacaaaatgaaaactataaataataatttttttttttttgagatgaagtctcactctgtcgcccaggctggagtccagtggtgcgatctcggctcactgcaacctccacctcctaggttcaagcgattctcctacctcagcctcccaagtagctgtgattacaggcacacaccaccatgcctggctaatttttgtattcttagtagagatggggtttcagcatgttggccaggctggtgtcaaactcctgacctcaagtgatccgcctgcctcggcctcccaaagtgctgggattacaggcatgagccaccatgcctgagctcaactttgaagtgtcaacttgaaactgcctttgcaaagattaaggcagtgatagaggctgggtgcagtggctcacacctgtaatcccagcactttgggaggctgagatggatcacttgggcccaggaattcaagaacagcctgggcaacatggggagaccctgtatctacaaaaaatttaaaacttagccatgcacagtggtgtgagcctgtagtcccagctaccccgcggggctgaggtggaaggattacttgatccaaggaggttgaggctgcagtgagctgtgatcacgccactgcactccagcctgggtgacagagtgagaccctgtctcaaaaaaaaaagacagagaaatttcacacagttaattccgtcttcctttggacatccaagctgtccagttgttcctgggcataagccaagctaattttaggagctttgggaggaatttacagtttaaccttgaaacaaggatgataatagtcccttcctaaaactatcacctcccacttctggggctgaaattgcctttgtaaagctaatgaaaggccacaaggttaggattgtgggagtggcctgaactctgctaaaatgcaggcctagtttctacagtccctcactgctcaggactcatgtggccagaggtcacaaaatttgcaacttcccgaattgcacctatagataatatcagtattgcaggacctaagaatggctttttgagatgtttttcagagtgaacccaccccaacctgctactcaggactcaattggtttctgtggccccacccagaggcagactcagtgcttgaggaccgttttccacacacccttttgatttcattcccagtcaatcagcagcatccattccctagccccctgcccaccaaattgtccataaaaaccctaactgcggccaggcgtggtggctcatgcctgtaatcccagcactttgggaggccgaggcaggcggatcacaaggtcaggagttcaagaccagcctggccattatggtgaaaccccatctctactaaaaaatacaaaaattagccaggcgtggtggcgtgtgcctgtcgtcccagctacttaggaggctgaggtaggagaatcgcttgaacctgggaggtggaggttgtagtgagccgagattgtgccactgcactccaacctgggtgacagagtgagactccgtctcaaaaacaaaaacaaaaaaacaaaaaacaaactcctaactgctgagcctttggagagactgatttgagtagtaactgtctcctgtgtggcctgccaggtgtcaattaaactcttttcccggcctgctgcaatcttgatgaattgactttttgtctgtgcagtgggcaggaagaacccgatgggcaatggcaagctgaagaatgatgagattcataaatctggaaaggagagctttacttctcataaagggtttcagcctgcagggtggccattctgacagacagggaagcactgcctctggccagaagccagaaacagacacttccagggaggggcaaagggaacaggaatctatgaggtgcagtgtgtaaatatacatatttatcaagctacaggagaagtcatgaatatttttgaagagagaaacatacacaaacacaatgaagcttcaggccccttcacgagggtcatgtcatctcaccagaaccactccatggtcagtgtctcttatcagtaaggaatactggtcaattgggccgaaactgcaaatgagagagttgttatcagcggtggagtctttcgaaagcgctggtttccgttaagctcttagccaagaaaacctaatggtagttagccaagggttggccttaataacaggtgtctcacctcccatctgtcatggctgagaactgccttcaaggcaaccctgggatctccttagccagtagggggttcgtgtagtcagttgggggtctttggatttcattttcatttctcagaggacaggaaggaaggctctaacatggggaatcctgagaactgctgctgtctgttaaatacgcctacaagttatttttcttatgtcacactctcccagacatgttcttacttctcatttctgatttctgtaatacacacacactgatttcataaaacgtttatgagtccaacacttccattatagccctgtatcaatgttttgcttagctgaaatcaatttcttggaggagtaagtgttatctttactttgtaagctgtaagggcccaaatcaatgtacttggtaaaactatccatagtgaacacacgcaaatgtcaaatggccatcatttagcatctgccctcgggcttccgggtccatcacgtggttactgacaggcaggccgcgcatgcgcgctgctactccgccgagcctacgtgacacgacgtcaagtggcaatggcggcggacgagggctgtgcccccggcccgccccgttaggagccgcgagtaaggcgagtgtccaacgccgagctggctgacagagcccggccgcggcctccgcgggcccaggggcctccaggccccgtgaccaccggaccgagcaccctggaacggccccagcttggcctcgggacagtccgcgcgctcaccgactccctggtgaacgccgcttggccgccgccgccgccgcaggacccacgagaagcggaaaccggcgcaaggacccggtccccccggcgccgtacgtggagtgagcctgcggtccgccccgcgcgctccgattggctctggggcctggcccgccccttcccgacactgtcattggcctaggcaaagccgtaagggtggggaatcctattggcccaggggtgcggcttgtcctctcccggtgctctcattggccgagcgcggccgttgggggtgaggccgcgtcgggggaggacaacaaagggccgcgggcggcgggcagtggtgtcccagtctcccggtgcttccctgaggctgaggcgcccggcctcccgcccgccgcgctccagatgaagtgtgagcactgcacgcgcaaggtgagcgccgcgggccggggaggcgcgcgcctggtgcttgtcctgtggggctctgggcggccgaggttggcggtccgggcccgccgctcgctcgcttcagggctcttcaaggcgcccccggcctcggcaccctgggcccgctcggcgtggaggcggccggcgcggggtccgctgcgctctgcagggcgggttcggtcttcgcggttctccctgaacttgtccatctttcccacgcccgcgaagcgcggaaacgcacggagaccgagcctctcgtgccgcgcaccacagtccgagtaaacagcggtcgtggcgggaatgatcagaagcgtttcgagagggttttaggcgttttcgaacctgcccctctgagggtcaccgagcagccggtgcaggggcggaagcgggtgacggctgctgaccggcgccttccgcggttgtctccaggccatggcaacaaccgcgcagcgcacgcaggggggttttgtagctgttattgccggaatgggctcctgtggatgctgctctgtggctggcacttctgcgcgtgacgccgtggcaggaggcttcctaacattccatgggtcgttcatccccggtggtggctgcgtcctattctaagtacacctgtgtccaggggaattcgcctgtggggtgaaggctacagttgcttctgcttttttattattgtaaacaatagagatgtgtgtgtgtccttcagtacctgtttcactagaagggttagaaggatagaaggccaggcacggtggctcaagcctgttatcccagcaccttgggaggggaggccgaggcgggtggatcacctgaggtcagcagttcaagaccatcgtggccaacatggcgaaacccagtctctactaaaaatataaaattagctgggtgtggtggcgcacacctgtaatcccagctactcagaaggccgaggcaggagaatcgcttgaacccgggaggtggaggctgcagtgagccgagattgcgcccctgcactccagcctgggtgagagcgagactccgtctaaaaaaataaataaataaactaaaagaaaggatagaaatacatgagcttcattggtcagaatgtgcacattttcttaagggagacgaagtaaaagttcattgataatgttcctttgcttttttaaggaatgtagtaagaaaacaaaaactgatgaccaagagaatgtgtcagccgatgcaccgagtccagcccaggaaaatggagaggcaagtagatttttcagttttgtatcagcccagagtaaactactgctgctgtttttctctttgggggctcacagcaccgtgcacatcactgctttaaagaagactgaagtacgcgggcatggtggctcacgcctggaatcccagcactttgggaggccgaggtggacggatcacttgaggtcaggagtttgagaccagcctggccaacatggtgaaaccttatctctgctaaaaatacaaaaattatccaggtatggtggtgtacgcctgtaatcccagctactcaggaggctgaggcaggagaattgcttgaccctggaagacagaggttgcagtgagctgagattgtaccactgtacttcagcctgggcaacagagtgagactctgtcccaaaaaaaagactgaaataggccaggcgtggtggctcatgcctgtaatcccagaactttgggaggccgaggcaggcggatcatgagatcaggagattgagactatcctggctaacacagtgaaacctcatctctactaaaaatgcaaaaaattagccgggcgtggtggggggcgcctgtagtcccagctactcgggaggctgagccaggagaaaggcgtgaacctgggaggcggaacttgcagtgaggcaagatcgcgccactgcactccagcctgggcaacagagtaagactccgtctccgagactgaaataaacttgaaggggctaataaagacatgtgtgagacagtccatcagtggcacaaggcctgtcttctcagaacacactacaccaaaacacactgcattgggaacaaagaaaacgtggtgtaatactggatttcttcttttaattttttttttccccttttgagacagggtctcactgtcacccaggctggagtgcagtggctcactgtatggctcaccgcagccttgacctctgaggctcaagtgattctcctgcctcagcctccctagtagctgggactacaggtatgcaccaccatgctcagctaatttatttttatttttattttttggtagaaatggagttccactatgttgcccagattggtcttgacctcctgggctcaagtgatcctcctgcctcagcctcccaaagtgctgggattacaggcgtgagccactgcacctggcctctcttctaattcagttcttgtttttaaattctccttagctagtagctatggtctctgtttattggatacataacctgagcctggctctcaagaatgtgattttacagccaggcatggtggctcacacctgtaatcccaacactttgggaggccgaggtgggtggattacctgaggtcaggagttcaagatcagcctgaccaacatagataaaccccatctctactaaaaatacaaaattagctgggcgtggtggtgcatgcctgtaatcccagctactcaggagcctgaggcaggagaattgcttgaacccgggaggcggaggttgaggtgagccgagatcacgccactgcactccagctggggcgacagagtgagactccgtctcaaaaaaaagaatgtcattttacatgcagtctcatttcacgcccagaaggaacattacatgtaagcctggccattatccctgttttactgagtgaagggtgttgggagaggttaaggtcagtctacccttagaaagtactagtaccagtttataaatggagagttggcaatatggcagaagcatattttttccttaagtttagtagtcctgacatgtttaatctgacaggtgttctcccggttgccctgtgtgccagtgctgtggggactgtggggcttagggagcaacagggcctgagacaagcagccaaagagctggccacaggcagaagagaggtagggtgcattggagccctggaggcagctggggccagtgcgcctgagtggccgaccccaggggcctccctcacctgccctctggttgtgtcgttgtagacagatatctaagccctgtgagcctcgtttccttatcagaggcctggggagtagggttacctccctcccaggactgtggtgaggatgagataacgtgtgtacacagcctaagtgggcgccctgccaggtcagtgatggacacagggtgagaggagttgggttggggttaatggagtggaccctgaagagtggtcagaattcagggtgggagtgtagggaagggcactggcacaccaggcaagaggagggtgtggacagacgtgctctagggagagacagtggctccccttggccaggtcaatgacagtgcagagctgtggagaccgtgagggggtgactcaggtgtttgttttagggcaggtgatggaggtaaccgacttaagctggctagagtaggggaagaattgcaggaagccacttgggtggcagctttgagagcctaggcagaggtggtgggcctgggcaagtctaccagagtgatagagacagaacagaggacgtagtgcagggaagggagtgcagttttagctccacagacactgggccttctacggtgtgtgagtctggggtttggtgagagcactccgctggaagtgcaggtggcagggctgccctgggctgagtgaggccagcaggcctgataaaagggaacaggacttctgtagaatgcatcagtgtggaaggcaggaggaataagaagaaagaatgtgaggggtgaggagggaatcagacctggaccatgaaaacttatggaaggactgggttatacacagcatgtctggtggcaaggcagggaggaggcactgctgggtgaggggggcagtttggtcatgggcatctcagtggggatgggctgtggaggcacaattcatgcagctatgggcaccagatgtttggagtggagctgtggctttgacccactgggaacttgttagaagcacaaactcttgagccccatgcggacctcctgagtgcccatctgcagcagaacaagatcccaggttgagtgggctgcacagagacatggggtcatgtgtaggcaggaggcagaggtgacacccgagctgcggttcgtagcacgctgtggaaggaggaggcacatccatagccgtctcctgtcaaatcaagttttaaagaaaaacgaatgcatggactacctgaggagcttctgtaatttattgacattactcctgtaagcttcagagtattcatatgttcatccaccagttatttattgagcactgtctgtgtgcagtacctcttggaagtgctgaggaacaagagaacaagacagtgttcaagctctcatgagcttacattttagcgaggagggacagactcctgctagcagtcagcaacataagtacagatgggtggggagggaagagacgggtgagggggtggtgctgttttagcaggtgttggacatcgtctctgctgaaggccacccagggtgagcctggggctcttagaggttgcttcatgcagaaggatggcgagagcagcaagggccagtggggctggacgtgtggagaccaagggggctgtgatgggacccgggcagacaggggccactggctttgcccaggccctctgtgtgaggggcagctgtctgagcagagcagaggtgtggtttatgttttagcagatgtcggggagcacaagggccagtcaggaaggagagggtggaggggatcaaagagtgactctacatccaggtcaggataagcatcttgttacatgtccgagtgcaaacccagagccagcactgagttgtaaagttctgagcctcaagggagaggccagggctgtgggtggcctcagggagccgtgggatggtaagagggggcacagagctagaggagcagtcagagggctggatcacaggcaccaaagaggaaggggtctaggaggaaggggtctagcagtggggtgagcttccagaacacaggggtcatttacttcctaccacgtgacagtgctagggctgggttccacccttgtcatctgcatggttccctagtgtcattgtgggctgggccctgtgtcctgtgtcccttcaccaccttgagctgctcagtggcagagactgtcctgcttccagccccttgagcaccaggcctggaccctggtattatctccaatgtttactgtgaattctgtatatgggtgttaccctctctaaagaagcacattaaagagtatttgttgaataatcatgctgaaacgtcatctttcatagaagggagaattccacaagttggctgatgccaagatatttttgagcgactgcctggcatgtgacagctgtatgactgcagaggaaggagtccaactttcccagcaaaatgccaaggacttcttccgcgttctgaaccttaacaaggtaaggcattcggggcatttgctgatgctggggagctgacctggaggaagtggaggtgaggcctggcttcctgcacagaagcctctgctgggacatcggatgcacatctcagccttttcctggtgttgctaacatcctgctttgaccttccaaacctctccatcaagagcaaaatccccgcacaatttcctgctcccttaataatgctcaggcagtggtggggggctggcatcacccctcaggctcctgtggcttaagcggggcctctgcctggtgaggtcaggtaacacgggtgttggtgatcatgcgggcagcacagagccggagctcctgctgttctgcctcggctgcacgttttcggacacgagagttatgttctaatagaccgatcagcttggggcaaggcagagacactccaaggaagtaaaaattcccaaagctccttccttcagctcatccctgcagacctcctatacagaacgagaggtgccacttgtctttccgtgagacaggttgtattagtccattctcacattgctacaaagaactacgtgacactggctaatttataaagcagagaggtttaattgactcacagttccacaggatctacaggagacatggctggggaggcctcagggaacaaccatggcggaagggtgaaggggaagcaagcatgtcttcacgtggcagcaggagagagcaagtaaagggggaggtgctgcacccttgtaaacaaccagatcttgtgaggactcactcactatcatgagaagagcaagtgggagatccgcccccatgacccagtcacctcctgccaggcccagccttcagtttcacatgagatttgggtggggacgcagagccaaaccatatcacaggtgaaagagaaagagacaaaggcagatgaggctgaaaagcacttcttggtttccatgctgtcacctccacgggaagcaccggcatcctaccctgcccagggtgtaggagcccattcacagtaggtagtgtgctagagcaaggtaggggcctcaagaaacactgactggcacaagtgggtggcataggggacagccaaggagccttctcagcgtttgccattcacccccatggcttctggacaagtcatccagcagcaattagatcacaatatttttctttgtgagacagggcctcacccaggctggagtgcagtggagagagtctcagtggggagactctggtgatcctcccacctctggaggctccctgtagcctccagagcagctgggactacagacgcgtgctaccacacctgcctaatttttgtattgtttgtagagacagggttttgccatgttgcccaggctggtcctgaactcctgtgctcaagcgatcctccagcctcagcctcccaaagtgttaggattataggcatcagccaccacccatgacctagatcacaattgcagatagagacacatgtcctctgtgttgccagcattagttgtgtctgggtgtaccctgacttatatgcacttgcacgggaactccgttagcaagcagcaggctgcctggataggatggtctgaaccaggagatgccccccacccatcagccaggttcgccatgcatacccgtccccacctgctcacccttggcctttcagggaacagaatggcttcagccattttgttacgttgaacagacttagtggatacagctttgcagactactagagacttaattctgtggtgtcaacggtttttgcaaaaacccttgaaagtgtctgtgtcactttatgcttccctaagtgataggggcaaacagctgtgtgcagccatcctggtcacattcaatatcaaattcagttttttcccccctgatacatagagaattgtatctcatttgcattttcttgcttatttagagaagttggttaccctagatgatgtttattgacagtttatattttatcttatgctgcttgtccagtctacaacttatattttagtacggtgtgcgatgtgaatacattcttcttccttttttttcttttctgagatggagtctctcactgtctctcaggctggggtgcagtgtcgtgatctcagcttattgcaacctctccttcctgggttcaagcaattctcctacctcagcctctcaagtagctagagttacaggcaggcaccaccatgcccagctaatttttgcatttttagtagagatggggtttcatcatgttggccaggctggtctcgaactcctgacctcaagtgatgtgctcgcctcggcctcccaaagtgctgggattacagacgtgagccaccacacccggccagatacattcttttctatttgaaaaaatcaaattgttccagcatcttctgttcttcccctgttgacctgaaatattatcctacctctcttatatattgatagatgtgcatccatttgtttcttttttttcggccttcaccatgttggccaggctggtcttgaattcctggcttcaagtgatccacctgccttggcctcccaaagtgctgggattacgggcataagccaccgtacctggccttcttttttttttttttccccattacttccaccccacccttgtactgcgtgtctatttcttgacccttttttgagatggagtctcactctgtcgcccaggcttgagtgcagtggcacgatcttggctaactgcgacctccacctcctgggttcaagcagttttcctgcctcagccccctgagtatctgggattacaggtgcacaccaccatgtctggctagcttttgtatttttagtagagatggggtttctcccttttggccaggctggtctcgagctcctgacctcaggctatccaccagccccggcctcccaaagtgctgggattataggcatgagccaccacgcctggcccttgactcttatatctgaacctgtcttctattgcgctgccaacatctagtttatgctagtttatgcagtatttttttagaacagtttgtagatgaggcttactcacaaaacatcttaggcctggtaactttttttttatttttttattttttatttttggagatggagtctcactctgtcgcccaggctggagtgcagtggagcaatctcagctcactgcaacctccatttcacttcaacctccacctcccgggttcaagcgattcttctgcctcagcctcccgagtagctgggattacaggcacatgccaccacacccagctaatttttgtatttttagtagagatgggtttcgccatgttggccaggctgatcttgaactcctgacctcaaatgatccgcctgcctcagcctcccacagttctgggattacaggtatgagccaccatgcccagccgggctgatgacttttaagaggcatctctggataccattttagtgtgtctgttttttttattgttgtgtagtaatttcacttattcattggccaatgttgtaatttgtattttccctttaaaattatttattttttccagatattcacatttactgatataacattgttcttgaaattgacaaagtcttttagatctgtagtcttgtctcttttaagacagagtattggccaggctaggtggctcacacctgtaatcccagcactttgggaggccgaggcaggtggatcacaaggtcaggagtttgagaccaggctgcccaatatggcaaaaccccgtctctaccaaaaagacaaaaaattagctgggtgtagtggcaggtccctataatcccagctacttgggaggctgaggcaggagaaccacttgaacctgggaggcagaagttgcagcgagctgagatcgcgccactgtactgtagcctgggcaacaagggtgaaactctgttttttttttttttttactgtagcctgggcaacaagggtgaaactcttttttttttgagacagagtattactctgtcactcaggctagagcgcagtggctatggctgttcctaagtgtgattatagcgctctgcagtctcaaactcctggcctcaagtgatcctcctgtttcagcctcctgtgtagctggaactgtaggcatgcaccactgaagccagctcatgtttcattttttaaatcctgacttttaaaaaaatatttaccagaagcccaaacctcaccataatcctgattttttttctcctttttcttaattatgtttgccagtgtttgtctattttattagtctttgcatagaccatctattaacgttgttctgaatttctcattaaggtgtgtaacttttactccttgtgtaatcagcagatacctaacattctctatttctccttctagaaatgtgatacctcaaagcacaaagtgctggtagtgtctgtgtgtcctcaatctttgccttattttgctgctaaattcaacctcagtgtaactgatgcatccagaagactctgtggtttcctcaaaagtcttggtgagtcatcttttgataaattgggaatgtataacttgagtttataagcgccctttttaatctctaaagttcgtttttcaaggacgcagggtagataagcaacttccaaaagagtctcttggaacgtaaaaagaccatgtcccgtgtgtcatgaaacccagcctctgatcgatggtagacgagtgtcacttttctcctttgctgtgcacagacaggtgttttgttacacagtgggagctgacccctctgggaccaaacagtgaccaccttctgacaacacggacaggacactgggagattcccacactggcccagcaacctccaagtcaccccttacccccagagggtgtgcatttgataaacagtcacttctgaaatgattagtatctggtttcccaagaagctctctgaagagcagagcagaaagggaatgggcttgtgttctttacttgaggaatgaaaggtagaaatttaagaatataataaaagaactcggatgtcaacgctggaatagtactacctgaaatgttgatggatgatgcttctgcgtcttctgctttggtcaaaggggaactgcctccctccatttgcttatagaggggcttttacagccttgagcatcctcatagcatgatggtcagtgtgcaagttcagaaagggaaaatgagcgagttgccaaataagaggttttttttgttgtttgtttgtttgtttgtttgttttttgagctggagtctcgctcttggtgccccaggctggagtgcaatgatgcgatcttggctcactgcaacctccgcctcccgggttcaagagattctcctgcctcagcctcccaagtagctgggactacaggtgcgcgccaccactcccggctaatttttgtatttttagtagagatgatgtttcaccatgttggccaggatggtcttaatctcttgacctcgtgatccacccgccttggcctcccaaagtgctgggattacaggcatgtgccaccgtgcctggccaagagtttttattattctacagcggcttttaaaaattataaatattggtcaggtttggtggctcatgcctgtaatcccagcactttggaaggccaagaccagaagattacttgaggccaggagctcgagaccagcctcgacaacataacaagatcctatctctgctaaataagtacataaatgtagatatattggggattactggtgaaataaaatgatatttggaataaggatcatcaggacaggcttgaagtctaagcagcagcctgggggtcctgatgctccctgtgccctaggcgcctgggctctaacaagacctggtcatctagcacataatgtgctgcagctgaaacccagctacagcgacaggtgcccacacgttaggtcgctccttcatgcttgtcatcataaagcctcgggttaggttagttacactgaagatcagagttgtcaaatgctatatattctcacgatgaaagcccttatttggggctagattcttaaaatgatgtaacggaatgttatatatcaataaaatgtatccacagtaaaatggatttcttaatgtaatattttaaaatttataatatttctttttttgttgttcttgagacggagtcttgatctgtcacccaggctggggtgcagtggcgccatctcggctcactgcaagctccacctcccgggttcacaccattctcctgcctcagcctcccgagtggctgggactacaggcgcccgccaccacgcccggctaattttttgtatttttagtaaagatggggtttcaccatgttagccaggatggtctcgatctcctgacctcatgatctaaccgccttggactcccaaagtactgggattccaggggtgagccaccgtgcccagcctaatatttattatagctagttgcattttctctcagctttgttacctggggagggggagaaacaaaaaatttaaaattaaaaaaatcaggccgggtgtggtggctcatgtctgtaatcccagcactttgggaggccgagggggcagatcacctgaggtcaggagtttgagaccagcctggcccaacatggcaaaaccccatctccactaaaaatacaaaaattagcctggcatggtggcagacacctgtaatcccagctactcgggaggctgaggcacaagaatcgctcagacccaggaagcagaggtttgcggtgagttgagattgcgtcaccacactccagcctgggtgacagagcatgactgtctgaaaaaaaaaaaaggctgggcatgttggctcacgcctgtaatcccagcactttgggaggccgaggtgggcggatcacgaggtcaggagattgagaccatcctggctaacgcagtgaaactctgtctctactaaaaattcaaaaaagtagccgggcgtggtgacgggcgcctgtagtcccagctacttgggaggccgaagcaggagaatggtgtgaacctgggaggcggagcttgcagtgagccgagatcacgccactgcactccagcctgggcaacagggcgagacactgtctcaaaaaaaaaaaaaaaaattcagtataaaaatttaagccattataaaagtatgcccttgccgggcgcggtggctcacgcctgtaatcccagcactttgggaggccgaggcgggcggatcacgaggtcaggagatcgagaccatcctggctaacacggtgaaaccccatctctactaaaaatacaaaaaattagccgggcgtggtggtgggcgcctgtagtcccagctactcgggaggctgaggcaggagaatggcatgaacccaagaggcggagcttgcagtgagccgggatagcgccactgcagtccagcttgcgcgaaagagtgagactccgtctcaaaaaaaaaaaaaaaagtatgcccagccattctatacttttactgtacgttctacttttaaacacatcaagaaccatcacagactgaaatttaatttgcctgtgaattggaagggaatgctgtgggtacgttgtaatatttcattaatttatatatggagtaaggtgttttaaaatgtagagagggaagaagcatgagagagaacatacatatttcattgtgaaaaatcatacacgctcattgtttacaaaataaaaggtaaagcacacggtcttgaacttaggccgttaggaatagataagaaccaagactgattttattatcttaggagggatgcctgtagaatctatgctttaagtttgtctcttaaacgtgagaaagcaaaaatgagtaagaatgaagaagtattggctggatgcagtggttcacgcctgtaattccagcactctgggaggccaaggtgggtagatcacttgaggctaggaattcaagaccagcctggccaacatggtgaaacctcatctctactaaaaaatacaaaaattggccaggcatgatggcgggcacctgtaatcccagttactcgggagactgaggtgggaggatcacttgaacctgggaggcggaggttgcagtgagccgagattatgccactgcactctagcctgggtgacagaacgagactccgtctcaaaaaaaaaaaaaaagaggaagcctaaaagtagatcttttagtacgtgatttaagctgaatatgctcctctctcctgcaggggtgcactatgtatttgatacgacgatagctgcggattttagtatcctggagagtcaaaaagaattcgtgcgtcgctatcgccagcacagtgaggaggaacgcaccctgcccatgctgacctctgcctgtcctggtgagcccctggacccccgctctgttggcctgaggtgccaaaagaggtttcacaagattctgcaggctctagatgaggttggaggcagacagacccatcccacccagccttgtagaccaggagggaagagcttggcctgattcacagagggtgtttgatgttttgggacagccaatttagtttttcatcagaggtgccacactggaaaggccagtatggttatttatttaattttattttatttttattattttttttttgagacagagtctcgctctgtcactcaggctggagtgcagtggcacgatctcggctcactgcaagctccacctcccgggttcaagcgattctcctgccttagcctgccaagtagctgggactacaggtgcacgccactgcacccaactaattattgtattattagtggagatggggttttgccatattggccaggctggtcttgaactcctgatctcaggtgatctgcctgcctcgggctcccaaagtgctgggattacaggcgtgagccactgtgcccagtctaggcagatctcttgagcccaggagtttgagaccagcctgggcaacatgtctctattttttttttttttttggagacggaatctcagtctgttgcccaggctggagtgcagtggtgtgatctcggctcattgcaacctccacctcccaggttcaagcgattcttttttttttgttgttgagacagagtctcgctctgtcacccagactggagtgcatcctgcctcaccctcccgagtagctgggactacaggcgcctgccaccacacccggctaatttctttttgtatttttagtagagacggggtttcaccgtgttagtcaggatggtctcgatctcctgacctcgtgatctgcctgcctcggcctcccaaaatgctgggattacaggcgtgagccactgtgcctggccaggttcaagcgattcttatgcctcagcctccccagtagctgggattacaggctagcgccaccacgcctggctaatttttgtatttttagtagagatggggtttcgccatgttgcccaggctggtcttgaaatcctgacctcaagtgatctgcccgccttggcctcccaaagtgctgggattacagacatgagccaccacacccgtcctctaattttttaaataaatattttttaaaaggaaaagaaaaataggccaggcatggtggctcacagccataatcccaacaatttagaaggctgatgtgggaggattgctttagcccaggagtgtgggaccagtctcgtcaacatagtgagacctcgtctctgcaaaaaaaaacaaaaaaaagccaggggtggtggcaagtacctgtaatcacagctactacgaatcctagcctgaggtgtttgagccaaggagttagaggctgcagtgagctatgactcctccattgtactccagcctgggcgaaagactgaggtcctgtctcttaagaaaatccgttttctcttgaaagtacaacatatctcagatgtacaaataattatggaataatatggcaaacgtgcatgtatcttttgccagcttaaaaaaaatacagaataagaaaatttctttacattgatattcagatactctcagggcgcactgtttaaaccactctttaattggtttttggatgcctgagttatagaagagatttgtcacatgcttttcaattctggaaaaatagagagtttgggttaagaaatcttcgatgatgcataagggaataaggaaggaatggctatcctggcaaacaacactagttaaaaattattctactacatgaggcctgtgggagcataggagagctctatctaagctagtcgtaggctgtataatttttagggtttggttcacgtttcagttcttaatttatgctccccctacaatggtttcaaatttttctggcattttacatgtcaacctttagtcattaggattatgaattaataagatggaacattgacatcgtggttgcttagaatacggacttactctctagccatttataaaatataaagaggaaatttaccatctgttccatgggctgcattggttggctcgttatttgagctgtatcgttcaccagcaacccacagcctgctgtgatctcagctccagatggggacagggatgttagtgacttctttcagctgtatggtttgccttactgtaagtgattcacagatttttgtatcagaggtcgaagtataagccatttgacgccagatacagccttttactagattgtgggtgttacattcagctcttgtggcattttgggtgtgtttccaggtgtaaagggataatttccacacctgatggtttctggggctgcctggactccagcaacctgggagtacctggtgtttgtgtgctgagcctgagcctgcctctgtggtccccttgcaggagtgctttccttttgggaccctgttacatgataccacacacaacatggcttcacaacaccagtcacacttgcttagttccacccccaaccaaggaagaggccgtgtaaaatgacaacgaactaaggcccatgcccctggagcagtggtttttaaattataaaaaatttaggccgggcgcagtggctcacgcctgtaatcccagcactttgggaggccgaggtgggcggatcacaaggtcaggagattgagaccatcctggctaacacggtgaaaccccgtctctactaaaaatacaaaaaattagccaggtgtggcgggcacctgtagtccctgctactcgggaggctgaggtgggagcttcactggaacccaggaggtcgaggctgcagtgagccgtgattgcaccaccgcactccagcctgggtaacagagcaaccctgtcaatcatacatatatactacatacatacagcaaatctcaagctaaaataggaagcaaggggctggcctgcagccagtggctggagaagagaaaggatttggtgacacatttctcagaaatgccgtcactgagaagagacctctcagggcccctacctagcattgtgttcactgccacaggcggagggatcaccgtttctatacaaatcagcaatctgctcaggattcacatcagcagagttagttccttcagtgacttgagaaggttccatcccagtaggacctctcataaggaaatcaacaaatgtaaggagactgcaaaaagtttgtggaagaacagaattaaaagataaaaagtataaactttatttctcaacataagctccatcctggtcaagacttttttttattttttattttatttatttatttattgagacagagtctcgctctgtcacccaggctggagtgcattggtgtgatcttggcccactgcaacctccatcccccaggttcaagtgattctcccaactcagcctcctgagaagttgggattgcaggtgcatgccaccatgcccagctaatttttgtatctgtagtagagacagggttttaccattttggtcaggctggtctcaaactcctgacctcaggtgatcgcccgcctcagtctcccaaagtgctgggattacaggcacttgccaccatgcccggctaatttttgtatttttagtagagacggggttgcaccatgttggccaggccagtctcaaactcctgacctcaggtgatccgcctgcctcggcctcccaaagtgctgggattacagcagtgagccactgtgcccagctaacacttttttgtttgtttgtttgttttgagatggagtctcgctctgttgcccaggctggagtgcagtggcgtgatctcggctcctctgcctcctgggttcaagcgattctgctgcctcagcctcctgagtagctaggattagaggcatgcaccaccacgcctggctaatttttgtatttgtaatagagacacggtttcactttgttggtcaggctggccttgatctcctgacctcgatgatctgccttccttggactcccaaagtgctgggattacaggcatgagccaccacacctggcgtttttgagacggagtttcgctcttgttgctcaggctagagtgcaatagcgagatctcagctcactgcaacccccacctcccaggttcaagccattctcctgcctcagcctcccaagtagctgggattagaggcgcctgccaccacgcccagctaatttttatattttcagtagagacagggtttcaccatgttggccaggctggaatagaactcccgacctcaggtgatccacccgcctcggcctcccaaagtgtgctgggattagaggtgtgagccactccacccagccaacagttttttaagcaggatcttactttgttgcccacgctggagtgcggcagctcaatcatggctcacgagagcttcaacctcttgggctcaagtgatcctcccatcttagccttccaagtagctgggaccacaggcgtgcgccaccagctaatttttatatttatttattttttttaagacagagtcaggccaggcagggtggctcacgcctgtaatcccagcattttgggaggccgaggcgggaggatctcctgaggtcaagagttcgagaccagcctgaccaacatggtgaaaccctgtctctactaaaaatacaaaaattggccacacacggtggcgcacacttgtagtcccagctgcttgggaggctgaggcagaagaatcgcttgaacccgggagccagaggttacagtgagccaagatcgtgtgactgcactccagcctgggtgacagagcaagactgtctcaaaaaaaaaacaaaaacaaccaaaaaaacaacacagagtcttgctctgtcatccaagcttggagagcagtgatgcaatcatagctgactccagcctcgaactcctgggctcaaagccatcctcctgcctcagtctcccaagtagctaggactacaggtgtgcaccaccacgcctggatgatttttttatttttctagagacagagtctcaccgtgttgcctaggctggtcttgaaatcctgccctcaagtgatccgcctgcctcacagtcccaaagtgttgggattacaggcgtgagctactgcgcccggccctggggcatttctctctgtggctgcttctgtgtctctgtgggtgtttcctgagcacacacgggcgtctttataggtgaaactttgattgttaaatgggattatcatgtctgactgtgggacatgagctgcctctcaccctctgggcgaccttccccgccaggagtagagtctcccaaggtatctacccagcccctgtttgagggcaggttgcgtggctctcatgtacacaggtgtgcaagtgtctgtggggtcaggtcctaaaatcagttgccaggtcagcaagttctgtgatgttcttatgcactctgactgggctgtacgcctgcgggaaaggagtaggcagggctcctgcggtggaattgctgttgtgtggtcagctgcagtggtgacttgtgttcaccctggaaaccacagcagcactcaacctcaggaaagtgctcagattgtgcgggcatgtagtgacactacagatgttgctatttattacgacttgaggagtatagatttcttatattttaaaaagcgtgcagttgttgggctgttagtttctcgccggtgagagaagttgggcaagcatgtggctgctctcccctgagcggtagctgcgtgtcctggctgtaaggacgctgtagctggccaggcgattttgcacggtgcagcctgggccgctgctcctgctgcctttcagtgcttgttccccttcacctttttgggggacctgttactccgactcttacttgtctgtcggccttgcagggatgctcccatttcccagtagcctccaggcctgcaggttcccatgacccacagccgggccaccgaggacgggttttgggtccagcacgagctcctggtaaggcctggggaaaaggtgttctggcttcaccctggggcggcagggactcgagctcagcattccctggtgcgttacaggaagaccagaggaagcagtaaggagctgaccgtggatcccttctctccccaggctgggtccgatacgccgagcgggtgctgggtcgccccatcactgcccacctctgcaccgccaagtccccccagcaggtcatgggctctttggtgaaggattatttcgccagacagcaggtaagctgacctctctggagggcaggaagggcaggtgagggaggaccatggcacaggggcccaggaaggggaggttccccatctgtccagcgtggtcacggccccccaggtgagcaaaaaggaagctgtggcttcaggaaacatcagcagtgctgtttctcaccaacgcccgtctctattcctcccttcctcttacaacctttttctttcttcttaaccttttctgtggcatctggtggttttcctgggcccattcggggtagagtagaaatgctgcccaccctgctgagaatgaggccccggaccttgcccagagatgctgcctgcctgctgttgggatgcctcacccaaggaggcctaaagtggcctgtgcctggaggctgagggcagctgtcatttagggagccaaacctggcctctgccctggcctttccctcagaccacgggcatcacatgacttccttagccacttctgtgagattccacagtggccatgatgctgtcctcctcttgatggagtgagtcccggcctgaggctcctgcgtgccccctgcctcggcccgtcgtgttctcccttcccacaaccctctgcggcccccaggtcctcccagaactccctgatgtctccaaggccaccctcaaagggaccctaatcccatggtttattctccagccgctggcatgccccacactgctcttctcaatcagactttacacctccctccggggaagcagccatgtccaggcactgtggtaactggagtagagggtaacatcaggatctttcagacatttgaagtcagcctaaaaaggcacgcacatttggcagccttgttattttagcaataggcagtgttttccttctatctagtttctttctacccataaagtcataatttggcaaattataaacatgatgtcagagtatacacgttcagtttaggcaggaccgaaaaatgagctatgggactttctgtcccttgccctgcccccacctgaagagagccatgtgtttctaggtcttccacgtgctgccctctcccctggatggagcccagagctatgtgtcctcctgtaggtgccatgaggggcagccgcagagacccggcctccagcagcctctcacctgaccacctggcacagctgcaaccaggggcgggtttcctcttttgctccgcccctgccctgagtgggtcctttccacccagacctcaccacagggtcacttggcaactgctggctcctggctttgccaccagttcaggcccagccacaggcacctgctctgtgtggacccaggagaggggtagcttgggtgggcatcgcttgggaagattcaggaaagtctgtgggtgaagtagccagcgcgcgcacacacacacacacacacacactcactcaggcctcctgcaatggctccatgctggaccagcaacagctccacgccggctggacttcctcttacttgttttgtccccatgtgcacaggttcaggaggaaatgggctcagccttcccggttcttccaggaggctccactggctggggggctttgcagatgtttgggaggaccacacccagtcctgagggaggcagcagacagacatggatggagtgctggtgctcggtagagttgaagaggggatgggagccagatgtggctacagcactttcatctgtggggcccggcctcagacccacaacagtcccagccccaagaaagtgctgcatgcagccaggctcgatggctcacgcctgtaattctagtactttggaggccgaggcgggcagattgcctgagctcaggagtttgagaccagcctgggcaacacggtgaaaccccatctctactaaagtacaaaaaattagccaggcgtggcggcatgcgcctgtagtcccagctactcgggaggctgaggcaggagaatcgcttgaacccgggaggcagagtttgcagtgagctgagatcacgccactgcactccaacctggtgacagagcaagactccatttcaaaaaaaaaaaaaaaaaaagagtgcagcatgcagtgtctggagggcagcagcagggggcattcggtctcccatccctcttgttctgggcaccaagcgtaagctgccgtcacctcttcaccagccctaaatatgggtgcccctctcccacagaacctgtctccagagaagattttccacgtcattgtggccccttgttatgacaagaagctggaggctcttcaggaaagccttccccctgctttgcatggctcccggggcgctgactgcgtgttaacatcaggtgagaggtgggcgggggtgcacctgggcgctggggtaatctcctactggccagtacacaccagagccaggcagatctgtgtcccagagccatctcagtgcctgccaatgtggtcgcttgtctgaagttactgacagctgagggtcctaggggcttaactgcaggtgaagagaagggtcatgttcgatctagcctcctgtctcctctgtgcatcttcctcaagataaatcaggtctcagctgggcacagtggctcacgcctgtaatctaagcactgggaggccaaggcaggtggatcacctgaggtcaggagttcgagaccagcctgaccaacatggagaaaccccgtctctactaaaactacaaaaaactagccgggcatggtggcacatgcctgtaatcccagctgctcgggaggctgaggcaggagaatcgcttgaacccgggaggcagaggttgcagtaagccgagatcgcgccattaccctccagcctgggcaacaagagtaaaactttgtctcaaaaaaaaaaaaaaaagataaatcaggtcctgggagaaccacttgggcagtgtggtggccctaactttacattacagtccatgtaaggtacttatctcttggtgggaaagttgtctatagccatagcgggtctcctaatcacaaaccaagtctgcacttaaaacacaagtgaagtttttttcattcagaataaaatgaaaaaggcacgtttgctccagtgatattgcctttaccacggtattggccactcctttcagatgttaagagcctacagtgagttctgtgtgtgttgtggatggaagtgattccctggaattatgtagaacccattcagaagaatgttgacatcagttggtgggggaagcttaagactttgttaaaattctggcggaactgttttaattggtctctgaaaacaggtccctgcaggtatttagatcagtggtagatgaggcagagaggtcagctctcagggacaatctttaagggcgccaatgtccctcacaggcccctgacttgaaattctagcacgcagacgcctctggaaaggtccccaccccataggcacaggctccctgtggggtgatgtggcaggggtgttgaaggatgagggatagaagggtcctcagcacggccatccttcactctcagaggaagggcccaggggccatctgcttacgttgacaaaataaaacatgcgcggtgggctgtcagaagaaccatgtccagccatcttttttctgagtgcagatttataggaaattacgctattttcttacctgtgtttccagccatctcacagcatctaatgtgatgccacagccatagttttagaggctcagtttttctattaagggttttttcaggcatcctcatgtaaaaggaaatacagaaagtggttctcactttcagttgatctcattgcagaataaacaattgtcatataaatgtagctgggtacaatggctcagacctctaattccagccactcaggaggctatggctggaggatcacttgagcccaggagtttgagaccttgctgggcaacacagtgagacctcgtctctttttttttattttttgagacggagtctcactctgtcacccaggctctgcagtggctccatcttggctcactacaacctccgcgcctcctaggatcaagcgattctcctccctcagcctcccgagtagctgggattacaggtgcgccccaccacaccaggctaatttttgtgtttttagtagagagggggtttcgccatgttggctagactggcgaccttgtttcttaaaaaaaaaagggctgggtgcagtggctgacacgtgtaatcccagcacttcaggaggctgaggcaggctggtcacctgaggtcaggagttcgagaccagtctggccaacatggtgaaacccccgtctctactaaaaatacaaaaattagccaggcgtggtagtgcacacctgtaatcacagctactcaggaggctgcggcaagagaatcacttgaacccgggaggcagaggttacagcgagacaagattgcaccactggactccagcctgggcggcggaggtgagactccatctcaaaaaaaaaaaaatgcaaccagtgtatatttcatcatcctatctctgtgagcttgttatacacaaaagttttctgtttgtttcatgcaaagtaggccaaaaaagtttacagattttccacatgggaaaatcatggagagattgtttacataaatcccacagttcaagggcagaaagaggaatggaaagaggagttagaattgaattctgcttacgttttattagtgtttcattttattggcctcactttgccctttagatggactcctgctgtgtgtgatggagatttcataagagggaggtcacccagggtcactaatgtcaaatctcctgcaggggaagaaaagttcctgtggccacctgtgtcttttcagtgtcttacttcgtttgtctgcaggtgaaattgctcaaataatggagcaaggtgacctctcagtgagagatgctgccgtcgacactctgtaagtggcttctctggggagagtcctctggggggcaggacctctcgtcagccctgccagccacctgccaggcccagggctgccctgctttatgacgaggccatgtgaagcactgcgatgcagtcccccaggcccctgccacaaccctcagccaccctatagctgttgaatgggataccattcaccagggctgccagggagttgaaggtttggcgggcttccatggtgtgattgccaccctaaacccttgaggaaggacaaaatgcacaaacagctttgtcctcgctggcgcagggctgttcatgtgtgcaccagcccccttcttcctgagtgccgtctgtgcctcacattccgtgtggtctatggggcagtggggcagctccctcaggcccctttgcaccaagagtggcagtctgggttctgctgggggcggtgacctcgatacccagcaaggcccagggctcctgctgcaccccaggcactgggcagagagcaccacaaaggcagcagcgtgtgtcctcgccaacagtccgcatcccaggtgctgcattcgtgcccttttgggggaaggtaagatagaagtttacagaatttaagcatctgtggggccaggcgtggtggctcacacctataatcacagtactttgggaggctgaggtaggaggatcacttgagtccaggaggctggggctgtagtgagctatgattgtgccactgcactccagcctgagagacagaacaagaccctgtctccaaaagaaaaagaccataagcatctggagcacctgcaagagcctgtgcatgggctcggcgtgactgagagtcctccgccttgcccgagcatcaggcaggccctcccaagacccctcaagatgctagaatgggactttctgcaaagtttaaacatctgtacaggatttagcttctttggtggcgaacttggattgtgatgccctcaggaagtctggtttcactctttctgtcactgtacgtcagcattcatgaaggacttgtattttctctgccttgtgaggtttggagacttgaaggaggacaaagtgacgcgtcatgatggagccagctcagacgggcacctggcacacatcttcagacatgcggccaaggagctgttcaacgaggatgtggaggaggtcacttaccgagccctgaggtgtggggcagtatccacagcctgtctgtgcctgtggttagcacgtgtgcatggtgtgcctgtatggatctgtgcatgtggcggttctatggatggagtttacactagtcaaaatcaaaaggacttttttgtgtttattcagaccttttattttgctgacattccaaacttacattagaaagtgttcttggccgggtgcggtggctcgtgcctgtaatcccagcactctgggaggccgaggcgggcggatcatgaggtcaggagatcgagaccatcctggctaacacagtgaaaccctatctctactaaaaatacaaaaaatttgccgagtgtggtggtgagcgcctatagtcccagctactcgggaagctgaggcaggagaatggcgtgaacccgggaggcagaggttgcagtgagccaagatggtgccactgcactccagcctgggcaacagagcaagactccgtctcaaaaaaaaaaaggaagtgttcttaagtcacagataaaggacttgatggatcaaaattctctgtgttcattttgtagaaacaaagacttccaagaggtcacccttgagaagaacggagaggtggtgttacgctttgctgcagcctatggctttcgaaacatccagaacatgatcctgaagcttaagaagggcaagttcccattccactttgtggaggtcctcgcctgtgctggaggtgaggcgccaagagcagcacctggctctgtctcccacgggtgctcaggccacactggtcctgcagctgccagagagatggtgctcttggccacccagagcctctctcagccctgagagctttgtagggtatggatgctcccgtggggcttgtgctgggacattctaggctccattggttttgctcttttcctcaccccatgtagcatgtgggcattctcttggggacgtgccctcaggaggcccaacatggcaccaggtgagagtcagcccgtggcggctggcttagagaacaaatcacaagagttgaggctgccctgcctaggagaaacacccctgccccgtgccaggcaccaagcatgagccttctctgtcctgagtgatgggagagagcagtgagaggtggaagcgggaaggggtgtgacccagcctgggcctgaggggctcccttgttgcgtggagggagggtgggccactgtgggctgtgatcatccaggcaagtgaggaaggatccccacctggggcagggggagtgagaggatgagaggaggccaggacacggtgggggtctccgggaaggacttgctgagggtgtgtcagggaagaaggggaccctctgcccctgacccatggtggtccatctgcgcccctggtggggaactgaggacctttgtgccattgtgagtcggggggggcaccacgagggactcgagtggaaatgccgggtgcaggtcagttggaggagcggctccactgatgttagacaagtgggacaaggtgtgaagccacaggatgggaggggcccttgggcagggcacagacaagggtgtgtccttcaacacaaaggatctcgtagaggaggggaggcctcagccagcactgacaagaggagggtgagggcagagaggggagcctgtggccttggaggcctcactgagcattccaggggcacggaagggtcagtcccacagctgggctgaggagcagccgggaggtgggccgtgaagcagggcctctgggagggcctctgtgtgcaagcgggtggagctggggcctgaggaaggagaaggtgcaagcccagccccctgggaaagtggaggttggagaccagctggggtgccaccctggaacccatggggagtgaggtttaaccagggaaatttgctccagattgttttaaatgaactcttacactactaagagtgacatcatctaacacgttggagagtaagtagcattaatagataggagacacatttttactcaggccagtgttgggtgtgtgggctcatggctgggctcacagcttagctgcctctggtgcagcctccaggcagggcccagcacactaacacgtgtggtgcaggcaggagtggtttaactgcttgttcacaattcctgtgctatcctggttttgccaaattccaagagaagttggaaatcgggatttgcatatgaagccacccagttctaaaaggttggcaacttaggttttaggtaaaaccattttatgggtgatgtaaatgggtaagaatgagaggcacacgggtccaggcacggtggctcacgcctgtaatcccagcactttgggaggccgaggtggtcggattacctgaggtcaggagtttgagaccagcctggccaacatggtaaaaccctgtctctactaaaaatacaaaaattagccgggcgtggtggcacacacctgtaaccccaggtacttgggagactgaggtgggagaatcgcttgagcccaggagatggaggttgcagtgagccgagattaggccactgcactccagcctgaccaatggagagagactctgtctcgaaaaaaaaaaaaaagaagaatgagaggcacacggggctgtgagtctgggatcagtgtccctgacagccttgaggaagaccctggcctgttcagccagccctagccttaggccacacaacattccacgtcccctttattcctctcctgcttccaactcttccctgtgaggcaaaacttccttaagactatcccggctgggtgcggtggctcacgccagtggtcccagctcgaagtaggattgccgcttgaagccaggagttcaagaccagcctgagcaacatagcaacacccgcccctcccgcccaatctctacaaaaaatttaaaaatcagccgggcaaggtggtgtgtgtctgtagttctagctgctcaggaagctaaggcagaaagatcgcctgagcccaggataaacttacctgtgtttatctttcaggatgcttaaatggcagaggccaagcccagactccagacggacatgcggataaggccctgctgcggcagatggaaggcatttacgctgacatccctgtgcggcgtccggagtccagtgcacacgtgcaggagctgtaccaggagtggctggaggggatcaactcccccaaggcccgagaggtgctgcataccacgtaccagagccaggagcgtggcacacacagcctggacatcaagtggtgaagtcaggccagggccttccagctgctcttggggccagagccaagagcctctcagtagagggaggggctgccctgagtggagtattaaagacacttaagaaaaccgctcaatggattactttggtttctccgagttccctgctaccccgtttattggaggcccctcaggcagtttcatgtggtgctatcttcataataggtgtgggattggaactttttttttctttttttttttttgagacggagtctcactctgtcacccaggctggagtgcaatggcgcaatctcagctcactgcaacctctgcctcccgggttcaagcgattctcttgccccagcctcccgagtagctgggactaacgcgcacaccaccatgcccagctaatttttgtatttttagtagagatggggtttcactatgttggccaggctggtattgaattcctgacctcctgatccacccgccttggcctcccaaagtgccaggactgcaggcatgagccaccgtgcctggcagattggaacgttttaacatgagaggagcacttccccaatttatcccttcatcctaagattgtgaaaaagtcccaaagagtgggaatggagacagactactgtattttaggtttaaaaagaaaaatccagaaagtgtcctgtgaagagctaggacccccagaggttctaatgcacatgacttgaaggtgatttgatgtgggagtgagggcagagggtggggtggctgtgcctgtggactcctgtggccctggggttgttagggcaggcagtccacagtcccagatccctgcccattttggctctttcttttacccactcatattttccttgaaaatgtttttgccagaacattaataactgtcagccttttagaatcaggagacttacgtacaaatctggattttcagcttttcttagaaaaactgtagtttctgacaacagtaggccccattcctcacagccagtcaccaccctcctcccattcctcacagccagtcaccaccctcctggaccatactcggccctgggccattcctcacagccagtcaccaccctcctcccattcctcacagccagtcaccaccctcctggaccacactcggccctgggccattcctcacagccagtcaccaccctcctggaccatactcagggccctggaggcctggcaacccaggccccaactcaaacttgtacattcagtctttcagtcggactcgcactggggcaagggtgacagacacgagaatggaaaattgagaaggctgcccgcaccagctgggtgggtgcagggggccccagctcatcatcagcactgtcgtggggtgggagtcgggggtaaaggttccgtctgaccctgaggggttgaggatattcaggtggtccagcctcccgcagaagacttccctgtcacccttggcagacaggtttcttctcacacggccctggcccatccactcgccatgaagccctctgtgctcagggtgatggagccccctccattctggcactgcactgtgggcatgagcttgccttaaaaagaaaggagaggccaggcacggtggctcgtgccctataatcccagcacactgggaggccaaggtgggaggattgctggagtccaggagtttctacatgggagactctgtctctacaaattttttttttttttttgagacagagtctcactttgtcacccaggctggagttcagtggcgtgatctcggctcacagcaacctccgcctcctgggttcaagcgattctcctgcctcagcctctggagtagctgggattacaggcgcgcgccaccgcgcctggctaattgtattcttagttgagacgggtttcgccatgttgatcgggccggtcaggctggaatttctgacctcaggtgatccaaccacctcagcctcccaaaatgctgggattacaggcgtgagccactgcacctggcaaaaaatttttttttaaaaaggagaaagcagtttaaccacaaacagtgaaacagagctggcagacgcctgaaactccatggaaccatgcagctgtaccctagggctcctcccaggaaaagagagatgtcaacgtggcccaaggtgtcctgaagcactgggattggattaactcgagcgatggccttcccagccctccgtgctgcagagcctctgctcgctaggctgccttcatctcactctgtgtgctgtgcctgtgcacctgtcttgtcaataactgcatatattgtgttgcgttgcctgtcttgctggataactgcatatattgtgttcagttgtgtatttgttttgctttcagtctatatacagttgggtttccaacctctgattctggaataaacagttgcagcgtgtctgagtgaatggttgagtgagccgagccacctgctgccccagcagggccacatcttgtggtgtgttgccgtcctcactgcggccacgccaggtggcctcgccctgtgctttctgagccaccacctggtgtggagtcaggagagtcctctgtctccctccaggaagctgctcaccaggcctagaacaccagaagtcggtagagggccacccttgtccagctacagtgaagagatcacctcctgcagtaaccactgcgcagggcaccacagctggcctgccgtgaagccgcccctgcaggtcgcgtggggaggccaggctgaggcactgggcaccaacatgagacaccagaggtcccccgtgcctgctggtgggttatagccatggggactgtgtgcattttcttctgcacaggagaaaagtggcgagatttccttcattgtaaccggaacggtattagccgtcaggccaaggcgcctagatgtggaggcagcacactggtcgggagggatggtgtgcctggcccgtgcctgctggtgagccaggctggtcctggcatgaggcagcacgctggttggggggatggtgtgcccggcccgtgcccgctggtgatccaggctgacctggggggatggtgtgcccggcccatgcccactagtgagccaggctggtcctggtgtgaggaggaggaggaggaggaggacgagatgagccctgggtggcatcccgtgctggcaccaccatgtaggaacatggccatgtgtgctctggtgctgccatgtactgcaggggaccggaacacgtctgagctgataaacgtgttgccatcccagtgaacagatctgctgttcggtgcctgtggtctgatgggcagcgcctaggtttctcaattccatttccacctggcctgagagcttgtactcgtcgcagccagtgtagactgtccgcactggtccttagtgttgctgcagttgcaaatgggctcatccactgtgcctgcctgttggtttgccgcttgcctgggatgtagatctagggtgaacccttgggtgtgtgccggctttgagggtgtcccatggcctcatctgcgggcccagagctgagcaactgaggcgtctggacacatggcctgccacagtcgtgtgaccttcacgccgagtctaggccagagatgtcagaggagggaattgcggcccaggcaggggctgacttgcccaaggccacttggcctccagatggggcccggtgtttaagtttccacttcgaacagagcatctgtctaaagcagatcaaccctcatctcatggttaggagccctcagtccgccgctgcagggggcgagctgtcggttttgggtagaggccggctctgcattctgaggatgagccttgtgggttttggatagaggccggctctgcgttctgaggatgagccttgtgttctgaaatcaaggagagcaggtgccagggctgaacacttcaaagttgtaatgcgaattgtccaataggcaaagatttttattaagtattcagctgagtaagaagagggggtgctcacgactgctggctggagtgcagtttggcagtaacgccccaacttgatgaaagtcgtatagtttagctgttaggaactttccctggagcagtccacctcacaggtgcccagtgcgcaggacctggagaatatctgttctatgtctgcattggtgtaaacaagctacaacaccgaactaaaagcccatcggggcaagtgtcaggacatcctgggggttctaggagtggttaaagtataaaatagatgtttatgtcctgacatggacttttttttttttttttttgagacagggtctggccctatcacccaggttggagtacaatggcaccatcatggcttactgcagactcaacctctcagactcaatcaatcctcccacttcagcctcctgaatagctgggactgcaggcatgcgccactactcccagctaattttttgtactttctgtgcagacagggttttgccatgttgcccaggctggtctcgagctcctgggctcaagtgatcctctcccctcagcctcccaaagtgctgggattacaggcgtgagccaccacaccagcctgatttgaaatttggttagaataagaaagaaaacctggcaagccagagtgacagacatggcatctgcatggtgagtgtggatgagtggcagtggatttgggaggggggactggagcgggagcagtggctgccaaccatgggcctgacccggcgagcccgtcaccagattccagatactctcaccccgactgcttggacgtattgcaaatatagtgactcataggattactgtcctttgatttatgttaatcatagccttgaacgctttcttaaagtgtaaaagttacagttaaaaaaacctccaaccttacttttcataactctgccagctctttgtggcgggttagccttctgctctgggtggcacagtggcgtcagcgtctgttttgctaactctgggcatctcatcctaactgtgcccagccacacggagggcctcagagaggggcagagaagtgcattttgggtggctgcatttgccatccaatatcctagttggaatcgggagaccttgcatcaagccaggacacaggaccgctgttggatgccatggtctgagcagcaatgtggccctcatctgaggtgtgtgctgggtctgcctctgcaccagctaggtgtcctggtaagttaagtaacacttcgcctgctctctgttgcccctaagcctttgtctcgcatcaatcttggcagaatcctcctgttcctctgtcttcggctttagccaccatcagggcgtgtgtcctgctatttccccactcgtttttgccctgtaaaggaaagaccatgtagcagctggcactccttccccactccaggcccggtgtcctgggctgtggcacctgaagattctgtccctgagccagtctggacacagccaggcggcagcactggcattttgggatgtcagtgcatcatcatgggcactgtgtgtccacgtgggatgccaggacctggtgctgggatgtacagggagtgagtactgcggctgcatttctctcctgttggagggaggttctcacctccagcttctgatgatgtcagtggagcgagaatgccaacccagagggccgtgacactccagcccttttttttttttttttttttttgagacaggttctcgttctgtcacccaggctggagtgcagtggtgcaatctcagctcactgcagcttcgacctaccaggcccaagagatctctcacactccgagtagctgggactacaggcgccagccaccacacccagctaatatttttgtatatttttgtagagacggggtttcaccatgttgcccaggctggtctccaactcccgacctcaagcgatccacctgcctcagcctcccaaagtgctggggttacaggtgtgagccactgcacctggccttgatcttctagcgaaaactagagagagagagagagagagagagagagagagagaaacgttaagagggaaagaaaaggcaggaacccctaagcccactccctcaggagaggaagggaagagaggatggggatccagccagacccttttgtcaggaaaacacttgctgggttccttacctggaggggtctctagtgagtcggttgatggcaggaggctccctggcagccagacagggagaagaatgccagcctctgcaggcaccttcggccacgtggaggagcagacctaagtgtggccagggaggtttcaaagcctcgaaaatgctgcagacaaaggatgcatgtcctgtgccagaccctgttctctaagccaggagcaggtactgatggggggtcccgggccaggtggacacacagagaagaggactgaggagtgcaaaacccctcccttgctcccagggaggcattttgcccaagccagggaatgcagagggcaatgagcccacaactgccacaatttctgggacaaagctatgaggcaaggtatgctcacatcaagatttgaactcagattgctgctgttgcctgtcctccgtgccttgacacaaacagggacgttattggggcctggagaagaattatgggccacaggctgcccagtcaggaaagaaaagggagtctatagcagaggatggtttcgatccatcgacctctgggttatgggcccagcacgcttccgctgcgccactctgctggctataaggggggagcctgagtcagatcatgaccacaggagtcatctccctgcaggcggcgacccctactggccaagaggggccaacagaggactggctgggcaaggcacatgctcaattataagcctactcctcctctctcaacttcttgtagataaaactctctgaattcatgtccttttctgctgttaaaacattggctggaggccgggcacagtggctcacgcctgtaatcacagcacttcgggaggccaaggcaggcagatcacatgaggtcgggagttcgagaccagcctgaccaacatggagaaaccctgtctctactaaaaatacaaaattagccgggcgtggtggcgcatgcctgtaatcccagctactcgggaggctgaggcagaattgcttgaacccaggaagtggaggttgcggtgagccgagatcgcaccactgcactccagcctgggcaacaagagtgaaactctgtctcaaaaaaaaaaaaaaaaagttggctgggcatggtggcttacgctgtaatcccagcactctgggaggctgaggctcaggagtttgagaccagcctgggcaacacagggagaccccccccccccggcctctacaaaaaataaaaataaaaaaaaaaatagccaggggttggcagccaacgcctgtagtcccagctactcaggaggctgaggtgggaggatcgcttgagcccaggaagcagagagcaaagatcatgccactgcgctccagcctgggtgacagagccagaccccagtctcaaaaaacaaaacaaaaaaaagactgaaactcctgggatccaactgaaagtatgagccgggacactcaaaggagatagctgcagctagtctaatgaactgtctgtgaggagcatctcgacacaagccacggtcagcaccgaggcctgagccctcagggcagggtgcatccttcccaggagcctggaccctgtgagagctggagctaatgggatgggccaccaaacaggaggcatggctcccctgagaggagccatcgaccctaggccaggcagagaaagagctggggaatacccaagcctctctctcctccaccctccaatctccttgcccgtgcctcccattggctgcagccgcttagctgtcttgccctctgccttccaggcggcctcaggtaagaaaggcggaggtgggcctagaggacacatcccaaagcactacaggaagtaggtgtggccctacatgtatggacacgttgccaagagcacgggagggaggggaggctgaggcagagcctgcagccagggagctccgtgatgttgctggcacctggcagggcacagggtgcagccctgggcccagaacctccagactgggggctgccgatggggtgaggctccctgtgctgcacccacaggcctgtactgcaaaccttcacctccgcagtctaatgggtgttgtgtgagtcttacagacccaagcacacaggtacaggcacagaggtgaaaaggtgtcgactgggagaagacagagggaaccttctgagcagctcagaactgtcccagggcttggccaagctgctaggctcaaaaccagattggagggttggtgtcaaaggcttgctgatgaggtatgtggatggacttcttgcaacaggcccagaagttgagaagagatggtccctactcttctgggtgtacgaagcaatctaaacatgacggccagactctccagccaccttagtgatgcttgttttatggcctcggaccaaaatggtcatgagaacacggaaggagggcacgcccaggcttctttcttcgtcaagcctgcccgggcaagggctcctgctaaaatattttagcgaccaaccacacatcgcaatactagtggggtggggcagcccgcacctggtgacaggtggcctcactcatccttctgtggaaggcgcaggggccaggccggaaaagaccctgaggctggacctggtcgtatctgcgtccctgcaggaacccactgtcgctgcccctgcacgacgcccgccagcccacgatggcagcaacaggtgatgggcccgtgcaggtgggaaaccgattttcctctcagccgctcgccctccggaggcagctggcccaaaagaggggcatcgggcgtcctcctccacacagccttagagggggaggtcggcaccagcatctttcccacgctcctggcagatgcgcccacggcttctacccgggatgcccgagcgtcagtcgggccagcgccagccgcgcgcgccggaagcgtttgctcgtgcagatccccggcgcggaagcccgactacgaagctgcggcatcgcaggcgccgcctcaggtccccacccgcttccccccgggtttgcggacggagctggcgcctctgaaggcggaggcgagggccccgctccttgaccgttcttgctcctccgcgggagccgccggccgtcacgtgggaggtcacgtgggtggtttgtcaactgctcgcagacgccttcgcgcgcagccccggccctcacgggagtgcgcagtccgagcatgcgcagcaggaggcgcgagttgtcctccacagcgcggcggggcgggagacctccctcccacccagaccccgccggcctccctcccactcagaccccgccggcctccctcccacccccgccgacctccctcccacccagaccccgccggcctccctcccacccacccagaccccgccgccctccctcggcgctcgggacaggctcgggacgctggggccgcgtccgagcacgtgagggctgagcagcccgcgcctctccttaggaaacccagtgagacgctgggtattcgaatgtggtcgccggggaacgggcggcgcccacaccccccgcgctcggagaactccccagtcccgcctgaaacgaacgcggtgccctaaagtgcgggctgcaggctctgccgcttgacgcggcgatgattgaaggtgctgcttttaggagagaatagaaagggccttctttcctttcccccggtggatgtaaacgtgcttgttattatggggcatttagaaaagcttctgtccactgtgtattctctttggcaacgctctagacactttgagggttgctgtcagatctggcccaacctctcctatgtgacgggaaggatttcaggcatttcaagtgccccgcgcagtgactggcccggaattccgcgcgtcttcccggtagcgtttttcctttgtctttggtagaggactgggggtgggtgggggggtgggtctcacactgttgctcacgctggtctcgaactcctgagctccgtggatcctcccgcctcggcctcctacgcgctgggagtgcaggtgtgagcaaccccgcccggcccagagcggcttaataccagctttccagcgttgtgatttccggagaaacgcaggctgacttccatgtttactattcactcttcttcactaatgacaccacgtacattctgttcgtgatttctgtgtgactcaagtccacaaatccttcgtgtgctatgcggagcctttgtgattgttgagggttctcaagatactcactgatggggccgggcgcggtagcccatgcctgtaatcccagcactttgggaggccgaggcgggtggatcacaagatcaagagatcgagaccatcctggccaacatggtgaaaccccgtctctactaaaaatacaaaaattagccgggcgtggtggtgtgtgcctgtaatcccagctatcgggaggctgaggcaggagaatcacttgaacctgggaggcggaggttacagtgagccgagatcgtgccactgccctccagcctgagtgacagtgagactctgtctcaaaaaaaaaaaaaaaaaaaaaaaccggtattcatttatgtaaaagactccctgatgtaggtaatgtcggtctggtttaaaaacctatacaaccaaacaacataggcaatgtttagtcttaggaaagactaaccaacatcaggtggcagtttttctgtttaaaaaaacctattttggccgggagtggtgtttcacccctgtaatcctagcactttgagaggcctacgtggacagattgcctgagttcaggagttcaagaccagcctggacaacatggtgaaaccccgcctgtactaaaatacaaaaaattagcgcggcgtggtggcgcctgtaatcccagctactcgagaggctgaggcaggagaatcgcttgaacccgggaggcggagcttcagtgagccgagatggtgccattggactccagcctgggtgacagagcgagactctgtctccaaaaaaaaaaatggtttcaaaatgttttgagaagcatctgttttgtctgatgtgttttagttgattaagtgcaagttgcaggatcggaatcttgaacaataaatcttccactaaaaagtgttgagtggaattactgctcgtcgtaacaggtgtaatgagacagcgtggtactgaaaccagcaaatttgtgggtgtgtctgtggccagcccagtgtgtgtcctgctgactggaccagctgtggttttcctgtctgtgaccttcagctcccttctgcatctttgctttctgtttggtgtgttctctcataatgtctgtatcgtcattttcattctccatatttttttagttacgacgattcttttccttcatggttttgaccattagtgtttttaatttctgttgtgatacagtactttgtcttgagctccacaattgtgtaataaaataacaatacactggccggatgcggtggctcacgcctgtaatcccagtactttgggaggctgaggtgggcggatcacgaggtcaggagatcgagaccatcctggctaacacaatgaaaccccatctctactaaaaatacaaaaaattcaccgggcgcggtggctcacgcctgtaatcccagcactttgggaggccaaggcaggcggatcgtgaggtcaggagatcaagaccatcctggctaacgtggtgaaaccccgtctctactaaaaatacaaaaaattagctgggtgtggtggtggatgcctgtagttccagctacttgggaggctgaggcaggagaatggcgtgaacccgggaggcggagcttgcagtgagcccagatcacgccactgcactccagcctgggcgacagagcgaggctccgtctcaaaaaaaaaaaaaaaaaaatacaaaaatttagccgggcatggtggcatgcgcctgtcgtcccagctactcgggaggctgaagcaggagaatcgcttgaacctaggaagtggaggttgcagtgagcagagatcatgtcactgcactccagcctgggcgacagacagagactccatcaataaataaacaaaataacaatacaccacacatactgacttgcgagtgtgtgaaggggttctgtcctgagaacacacatctcttcagctacttttgctgtgttattagcaatttgtgtgttatttcttctggaacttccagaatttctcaggacaattgcatatgtttcagatgtgcaaagccttgatgtgacttcacactccagggatcacagttggtgctgccacaggcgtgtgccctgcaagcacaggcattccaagaaatggttcactgcagcaaaatttctgctgtggggcagggaccagctccatagaatctgccctccaggagggatttcccatcctgaccagcattcaagagtaggttctctgctcacactatgggagtcagatgttcggagaatgttccagactgtgtgttgggaagtatttcaaagcttgatctccccaagccttgtgtgctcctcttgcctggggctagtggtcaggagccccgtgggtcaatttctggccaggtgagcacgtggcagctggccatagcatagctgggtcgaagggactgcagagcccagcacaacccccatgcctcctccagtgcttccccaggaggcagggtggacactgccctacctggggccctatggctgggcctcagatcttcccagccagcctctttggccaggtgaactcaaactcctggactccagggatcatcccacctcagcctcgtgagtagctgggactacaggcatgagccactgtgcccagccaaaaaaaaaattttttttttttttttgagagggagtcttactctgtcgcccaagctggagtgcagtggtgtgatctcggctcactgcaacttccacctcccaggttgaagcgattctcctgcctcagcctcccgagtagctgggattacaggtgctcaccaccacgcccggctaatttttgtatttttagtagagacgaggtttcaccgtgttggccaggctggtctcgaactcctgacctcaaatgatccaccctcctcggcctcccaaagtgctaggattacaggcataagccactgcgcccagccaaaagatttttctaaaattatggctgtggaggtgtggagtcactggtagcaggagcaagaggtgtagacttgatcatgcagtgttggcaatagccagtggagacctgggtcccaggtcctgcctccccaccctctacctccacccccagtggaggcaaagaccttgactctcagtctccagctttcttccctctaccaagtcccctagcctggacactcacattctctgattctgtagacagcggggactaaaaaacctgtgctgtgatcatggttagtcaacccatgaaaagatgcacaggccgggcacggtggctctcgcctgcaaccccaggacttcgggaggccaaggctggcggatcacttcaggccaggagtttgagaccagactgggcagcatggcaaaaccgcatctgtacaaaaaatacaaaatttagccgagcgtggtggtgcacacctgtagtcccagctacttgggaggctgaggtgggaggactgcttgaacctgggaggttgaggctgcagtatgccgagatcgtaccactactacactccagccagggtgacagagtaagaccatgtctccaaaaaaaaaagatacccagcataacaccacaatgagatgccaccacgtacccactggagtgactgtgatgaaagaaaagggtggtcatggccgggtgcggtggctcacccctgtaaccccagcactttgggaggctgaggcgggcggatcacctgaggtcaggagctcgagaccagtctggcaacatggtgaaaccccgtctctattaaaaatacaaaaattagctgggcttggtagtgggtgcctgtaatcccagctactcgggaggttgaggcaggagaatcgcttgaactcaggaggcagaggttgcagtgagctgagattgcaccactgccctccagcctgggcaacaagagcaaaactccatctcaaaaaaaaagaagtgtggtcatgccaagagttgggaagagcaagtgggaccctgctacatggctggcggggtacagaatggggcagtcactttggaaaggtttggcagtttcttaacatttgtccaaggagcactggcgattttgttgaagaatggtgttaggaatcaacatctgggcactggccgtgcacgttgctactggaatgtcatcatttctcggcatctcaggggactgagccaggaaacgtgtgtgcacttggcccgtgtacgcaggcatgtctagaactgtttggtttctttctttttcttttttttttagagacaggatctcattttgtcacccaggccaggctgcagtggtgtgatctcagctcactgcagccagcctcaaactcctgggctcaagtgagctcctccctcagcctcccaagtagctgagactacaggcacgtgtcaccatgctcggctaattaaaaacaaactttttttggtaaagacagtgtctggccaggggcggtggctcacgcctgtaatcccagcactttgggaggccgaggtgggtggatcacgaggtcaggagatcgagaccatcctggctaacatggtgaaaccccatctctactaaaatacaaaaaattagccgggcatgctgtcgggcacctgtagtcccagctactcaggaggctgaggcaggagaatggcgtgaacccgggaggcggagcttgcagtgagctgagatcgcgccactgcactccagcctgggcaacggagcgagactccgtctcaaaaaaaaaaaaaaaaaaaaaaagacagcatcttactttgtcggccaggctggtctcaaactcctgggctgaagtgatcctctaccttggcctctcaaagtgctgggattacaggcgtgagccaccacgcccagcagagggattttcatcttgattctctgtgcttcacagaagctcagaataggtttttgcacgagtcagtgaatagtaactgcttggaacgttaattttttgtgaaatttctccagcctgattctgcatgtgacaagtgctgaccctgatcccaagccccactcagagctcagagtctgttggggagaatgtgtgtgtaaataaatgactgtcccagactctcagctgcagaggtgatgctaggcagggcagccactcaggagaagcagtaaccctcactgtgcagtagtaggtggtcgggtggctgacggaggggctgtgggagcaggtcttgcaggctggtgggcggggtcatgagctgaggcgcacaggtgggcagggggcctggggaatggggctggcagtgtgtgaggaatttgggtgcaggtcccgggtgatgatgacccaagtcacggctgctttccccctggcctcatgaaggtggggtctgtgcccctctgctcaagtgggccctggaatccggcccagtgcccagcatgagaatggaggagggaagtgtcctggacgagcaaatgagtacatggcagccctgagctttggagcctaggaggtgggaggaacagggacgccaccacaaacgcgaagcatccgcaggagcacccgggggtgcaggttctggggagcggaggccccgagctgaggtgacacgggccgctccgtttaaaaacagcctttcactgtcaagctagagtctgtccgactgtctgtgtgctgcatgtggatctgtttttccatgtgagctttggggaacaccagtttgagcacagagattcagaagggcagcccagaccaccaggctgaagcagctagagaactctgtacgtggtcaccaggggacgcctggcgctgcgagggaggccccgagcctcgtgcccccgtgaagcttcagctcccctccccggctgtccttgaggctcttctcacactcagatgcacgtggctcagaacacagaggttgcaggggagctcctgctgcgcctgcctgcactccaggacacatcctgaggaggctcttccagacacggtgcattcacttagaaggtcaatttgtgtaacctgaatatgactggagttcatctgtgtgcctcctaggacacagctaaaattgggacactggggtcagcctcctcctggtcccttggagggcacacgttacgaacaggttctccagctccaggagctcctgaaggtctgcggagaagttcaggtgcaggaggcctcaaaaccatagttcctttcagatccagttaatatcaataaatttaaacattttcttttccaagcaagatggctaatgcctgtaatcccagcactttgggaggccgaggcaagcggatcacttgagcccaggagttcaactctagcctatgcaacacagtgagaactcatctctacaaattataaaaataaacaacattgtcttagtatattcttttaaaaataggtattatgagatttatcgctgaagctctcatttgtttaaagtgaaattcaactagaaatatatgtattattcggccgggcgcggtggctcacccctgtaatccaagtactttgggaggccgaggcgggcggatcacaaggtcagaagatcaagaccatcctggctaacacagtgaaaccccgtctctactaaaaatacaaaaaattagccaggcacagtggcgggcgcctgtagtcccagctactcgggaggctgaggcaggagaatggcgtgaacccgggaggcagagcttgcaatgagccgagatagtaccactgcactccagcctgggcaacagagcgagactctgtctcaaaaaagaaaaagaaatatatgtattatttatctataaatctcacttgttcctgaaatctggtgagatttaaaagatctcactggccagttgcagtggctcacgcctgtagtcccagcactttgggaggccaaggcaggaggatcactttagctcaggagtttgagagcagcctggtcaacgtggtaaaaccctgtttctactaaaaatacaaaaaaagaaattagctggctgtggtggcggcgcctgtaataggaggctgaggcaggagagtcgcttgatcccaggaagcagaggttgcagtgagccaaggtcatgtccttgcactccagccagggcaacaagagcaaaactccatctcaaataaataaataaagaaataaaaataaaacatttaccaatttttaactttttaatttttatgtatttatttttttgagatggatggctgacttagtccattttgtgttgctataacaatactggagactgggtagtttataaagaaaagaggttgatgtagctcgtggttctgcaggctgggaagttcaagggcatggccctggttactggtgagggctttttgctcatttttttttttttgagatggagtctcgctctgttgccacccaggctggagtgcaatggcgtgatctcaactcactgcaacctctgcctcccgggttcaagcgattatcttgcctcggcctcccaagtagctgggattacaggtgcctgccaccgtgcccagctaatttttgtgtttttagtagagatgaggttttgccatgttgggtaggctggtctcaaactcctgacctcaggtggtccacctgcctcggcctcccaaagtgctgggattacaggcgtgagccaccgcacccagcctattttttattttattttatttattattattattattattattattattattattattattattattttgagacagagtctcactctgtcgcccaggctggagtgcagtggtgccatctcggctcactgcaacctctgcctcccaggttcaagcgattctcctgcctcagcctctggggtagctgggactacaggcatgtgccaacgcagccagctaattttttgtatttttagtagagatggggtttcaccgtattagccaagagggtctaaatctcctgacctcatgatctgcctgccttggcctcccaaagtgttgggattacaggcgtgagctactgcacctggccctattattattattattattattattttgtttttgagatagagtcttgctctgtcacccaggctggagtgcagtggcacgatctcagctcaccacaacctccacctcctgggttcaagcaatttttctccctcagcctcctgagtagctgggactacaggcacgcaccaccacgaccagctaatttttgtatttttagtagagacagggtttcactatgttggtcaggctggtttcaaactcctgacctcgtaatccgcccaccttggcctcccaaagtgctgggattacatatgtgagccaccgcgcccggcctgttttattttattgtttgttttgttttctaagagacgaggtctcactctgctgcccaggctagagtgcagtggcacaatcatagctcactgcaggcttgaactggcctcagtgatcctcccacctcatcctcccgagtagctggaactactgactggctccactgcacctggccttcctgtggttttaatttgcatttccctgatgactaatgacattgaacatcttcttttgtgtttattggctatttatatatattctcttgtgaggtagcttttcaagtctcttgcctattttgaaaattaagttgtcttttcattacggagttacaggagtttttaaaaattccgcttagatacttttgtcagatacatgtactgtgaatattttctcaatgtgtggctcatgttttcatatttttcattgttttgatgagcaaaatgtattttttcttataaaattatcatttttttcttttatagttatcactttttaggtcttaagaaaatttttcctatctcaaaggaacaaagacagtctcctatgttttttttttaatttttaaaaaactttttacttttttagagatggagtctctccctgtcacccaggctggattgcaatggcgcgatttcagctcactgctaacttcacctcccaggttcaagcgattctcctgcctcagcctcccaagtagctggaattacaggcacccgccatcatgcccagctaatttttatatttttatagagatgaggtttcaccatgttggccaggctggtcttgaactcttgacctcaggtgatccgcccaccttggcctccccaaagtgctgggattacaggtgtgagccaccatgcccaaccaacagtctcctatgttttatttttgggagcttgataattttagcctttgcatataggtccatctgaattttatttttatgtatggcataaggcagggattagtgcttttgttgttattattattgttaaaacaagcccaattttcctatagaactgtttacagtgttttgttttgttttgtttggctaagcatagacattgaccctcttggtcttgaagcttgagaaaattaacatttgttttatctgagttcttttctttggaatccaatcctcaggccttccagatagtatcggggagctgaaactttccagaacactaaatccgaccacccccagcagcctgttgaccacctcttcttccttactcctccctacttcctaatttcccacccatagttaccttccttccctgctatctaaaaccctaacttcagtgggttggggaagtggatttgagactggtctcccgtcacctgctgacatcacgacatcacttgcaataaagccttcttccctggcaatactcgttgtctccatgattggctttccatttggtgagcaactggacttggccgaacccctggcattgggcaacattggtaatcagataccctgtactgtttattcaacagactttgctttccctattgaacaaccttggcactattgtcaaaaatcaattgactctgtatatgggggtctatttctggatttttcatgctgttccactgatctagttcttttctttttttctttctttctttttttttttttttgagacagagtcccactctgtcgcccaggctagagtgcaatggcgcaatctcggctcactgcgacctccccctcccaggttcaagcgattctcctgcttcagccacctgagtagctgggattaccggcgtgcaccaccacgcctggctaatttttgtatttttagtagagacggggtttcaccatgttggtcaggctggtcttgaactcctgacctcgtgatccacctgcctcagcctaccaaagtgctgggattacaggcatgagcccctgtgcctgggctcactgagctagttcttataccagtattattataccattcttttaccagtattccacaattttaattactatagctttacattaactcttaaaattgggtgctgtactttgggagactgaggcggggggatcacaaggtcaggagatcaagaccatcctggctaatacggtgaaactccatctctactaaaaatacaaaaaaatggccggatgcagtggctcacgcctgtaatcccagcactttgggaggccaaggcaggtggatcacgaggtcaggagatcgagaccatcctggctaacacggtgaaaccccgtctctactaaaaatacaaaaaattagccgggcgtggtggagggcacctgtagtcccagctactcgggaggatgaggcaggagaacggcgtgaacctgggaggtagagcttgcagtgagccgagatcacaccactgcactccagcctgggcgacagagcgagactccctctcaaaacaaaaacaaaaacaaacaaaaaacaaacaacaacaacaacaaaaacaaaaacaaaaaaatgagctggtggccgggcacagtggctcacacctgtaatcccagcactttgggaggccaaggcaggcagatcacgaggtcaggagatagaccatcctggctaacatggtgaaacctcatctctactaaaaatataaaacaattagccgggcactgtggcgggcccctgtagtcccagctactcgggaggctgaggcaggagaatcacttgaacccgggaggcagaggttgcagtgagccgatattgcgccactgcactccagcctgggtgacagagcaagactctgtctcaattaaaaaaaaaaaaaaaaagtagtccaggtgtggtggctcatacctataatcccagcattactttgggagactgaggcgggaggattgcttgagcacaggagttcaagaccagcctgggcaatatagtgagaccccatctctacaaaattttttttttttttttttttgagaggaagtctggctctgtcacccaggctggagtgcagtggcgcaatctcggctcactgcaagctccgcctcccgggttcacgccattctcctgcctcagcctcctgagtagctgggactacaggcacctgccaccatgcccggctaatatttttgtattttttagtagagacggggtttcaccgtgttagccaggatggtctcaatctcctgacctcgtgatccgcccgccttggcctcccaaagtgctgggattacaggcgtgggccgccgctcccggcctctacgaaaaattttaaaaatagctgggcatatggtgggcacttgtggtcccagctacttggcaggcttgagcccaggagttctaggatacagtgagctattaccatgccactgcattccagccttggtaagagagagagaccctctgctaaaaaataataataaggccaggcactgtggcttatgcctataatcctggcactttgggagggtgaagcaggtagatcactggagcctacgagttcaagacctggacaacataccaagatcctgtctctacaaaaaaaaaaatacaaaaattagctgggtatggtggtgtgctcctatagtcctagctattcaggaagctgaggtaggaggatcacttgagcccaggaggcgcaggctgcagtgagccatgattgcaccactgcactccagcctgggtgacagagtgagactgtctaaaataataataatgggccgggtgcggtggctcacgcctgtaatcccagcactttgggaggccgaggcgggtggaccacgaggtcaggagattgagatcattctggctaactgggtgaaacaccgtctttactaaaaataccaaaaaattagctgggtgtggtggcgcgcgcctgtagtcccagctactcgggacgccgaggcaggagaatcgcttgaacccaggaggccgaggttgcagtgagcccaggtcgtgccactgtgctccagcctgggtaacagagtgagactctgtctcaaaaaaaaaaaaaaattttttttttgcttgaagcattcattcagtaatctttaaaataattatttttattttattttttattttttgagacaggatcttgctctgtgaccaggctggagtatagtggtgcgatctcggctcaatgcagccttcacttcccacattccagcgatcgtccctcccacctcagcctcccgagcagctgggaccacaggcgctgccaccatgcccagcaatttttttttttttttttttttagtagagatggcatttcgccatgttgcccaggctggtctcaaactcctaaacttaaacaatccacacaccttggcctcccaaagtactgagattacaggcatggggcgccgtatggccaattattattattattatttttgagacggagtctcactctgtcgcccaggctggagtgcagtggcatgaactgggttcactgcagcctccgcctccgaggttcaagtgattctcctgcttgagcctcccaagtagctgggattacaggtgcccgccatcacacccagctaatgtttgtatttttagtagagatggggtttcaccacgttgggcaggctggtcttgaactcctgacctcaaatgatccacctgcctcggcctcccaaagtgctgggattacaggtgtgagccactgtgcccagcctattattattattatttgagacagtgttgctttgtcacccaggctggagtgcagtggtgtgatcactgttcactgcagtctccacctctaaggctcaagtgatcctcctgcctcagcctcctgagtagctgggattacaggtgttacctgtggttgtccaggttcttggcgttttgaacaaagaatcggacaaaacgcacagcaaagcaaggatagaatgaagcagacgttgattgaaaatgaaagtacactccacagggtgggggcgcccaagtagcagctcgagggccgtggttacagaatcttctggggtccagtaccccttagaggttctccattggccacttggtgtacactccacgcaaatgaagtagcagcctgtgatcagtttgatctgtttcggaaagcaaccaatcagaaggacttccaattttccatctgccacgcagaaagcagggaagggtttgcaaagggagtagcctctggtccttttgttactcaggtgtgggaagttggggttttacttttgatttagttctaggaagtcagcatgaatcagccttaggttccctgcctccgtcccctattcttctgcctcacaggcacacgccaccacacctggctttctatttttttagaaatgggatctcactatgttgtccaggctggtctcaaagtcctgggctcaagcaatcctcctgcctcggcctaccaaagtgccaagattataggcatgagccactgtgcctggtctaaataaattatttttggctgggcacggtggctcatacctgtaatcccagcactttgggaggccaaggtgggcagatcacaaggtcaagagatccagaccatcctggccaacatggtgaaaccacgtctctactaaaaatacaaaaattacctaggcacggtggcgtgcaactgtagtcccagctacttgggaggctgaggcaggagaattgcttgaactcgggaggcagaggttgcagtgaactgagatcgcaccactgcactccagcctggcaacagagcgagactccatctcaaaaacaacaacaacagcaaaactcttttatagttacccacatagccactttcccaggcgttctttatttcttggtgcagcactgggattccactggagatcattttcctctggtctgaagcatttctgtttgttggctggccgtggtggctcatgcctgtaatcccagcactttgggaggctaaggtggaaggatcactctagaccagcttgggcaacatagtgagacctcgtccctataaaaaataaaaaataggccaggtgtagtggctcacgtctgtaatcccagcactttgggaggccgaggcgagcggatcacgaggtcaggatattgagaccatcctggctaacatggtgaaaccccgtctctactaaaaatacaaaaaaaaaattagctgggcgtggtggcaggcgcctgtagtcccagctacgggaggctgacgcaggagaatggcgtgaacccaggaggcagagcttgcagtcagccgagtgagccactgcactccagcctgggcaacagagcgagactcttgtctcaaaaaaaaaataaaagggctgggtgcggtggctcatgcctgtactcccagcactttgggaggccgaggcgggcagatcacgaggtcaggagtttgagaccagcctgaccaacatggtgaaaccctgtctctactaaaaacacaaaaattagccaggcgtggtggcaggtgcctgtaatcccagctactcaggaggctgaggcaggagaatcgcttgaacctgggaggcggaggttgcagtgagtcgagatcatgccattgcactccagcctgggcgacaagagcgagactccatgataaaaaataaattaaaaaacaaaaaaaggaataaattatataataatttctgttagtatttttttgaaggctgaatcttctggtgataattttcagcttttgttgatctgaaaatttctttcattaccgttccttaattttttcttttttctttttaatagagacgaggtctcactatgttgcccaggctggtcttcaactcctgagcttaggtgatcctctcacctcagcctcccaaagtgctaggattacaggagtgagccactgcacctggccacctttccttaatttttattttttttgaggcagagttttgctcttgtcgcccagactagagtgcagtggcacaatctctgctcactgcaacctccgcctcccaggttcaagtgattctcctgcctcagcttcccaaatagctggggttacaggtgtgcaccaccacgcctggctaatttttgtatttttagtagagatggagtttcaccatgttgggcaagctggtctcgaactcttgacctcaggtgatccacccacctcggcctcccaaagtgctgggattaaaggccactgcgcctagccaattttttttatttttatttttgagatggagttttgcactgttgcccaggctggagttcagtggtgcgatctcggctcactgcaagctctgcctcctgggttcacaccattctcctgcctcagcctcccgagtagctgggactacaggcacccaccactacgcccggctaatttttttgtgtgtttttagtagagacggggtttcaccatgttagccaggatggcctctatctcctgacctcatgatccacccgccttggcctcccaaagtgctgggattacaggcgtaatcccaggcgcgcccagccatgcccagccaatttttgaagaacatttttgttagatattcaattctgatctcaatgactttgttttactcttagcattttacggatgtcagttctttgttttctggcttccatggctttcgatgagaagtcagctgtcattcttattgatgcctccatgaatgtattgtacctttttttttttcagacggagtttccctctttttgaccagactggagtgcaatggtgcgatctcggctcactgcaacctctgcctcccaggttcaagcgattctcctgtctcagcctcccaaatagctgggattacaggcatgcaccaccaggcccggctaattttgtatttttagtagagacagggtttttccatgttggtcaggctggtcttgaactcctgacctcaggtgatccacccgcctcggcctcccaaagtgctgggattataggcgtgagccaccgcgcccggccgaatgtaatgtaccttttaaagtctgcctctttttaggacttttctcattatcgttggttttcagcagttggactatgatatgcttttatgtatttttctttgactgtatctttttgggagtttgctgagctgtttggatctgtgggttggtatattttcaccaatgtataaacttcttacatattatctctttaaatatttcctctgctctattttctttctccctacttcttggcagtcaaatttcacatttattcaaccatttgatcttgtcccacaggtctctaatattcatttctgttttctttttttctcattttccttctttctttttatcttggaattttgattcagattatttcaaccgatgtaactttgagatgaaaaatcttgtcttcagctgtttccagtttggtgtttagataattcgataaattctccatttcatatattttagctttttctttatactggtgaacttaacactagtaaagtttacacaccccctaatcctaaagcccttactcctaaggtgttccctttctggggtctcaactgagtgcccaggttggaccaagatgctttacctttgctgccgtgtatcccagtcctgtgtcctctgcgatcgcttttcaactcccttgtaacagcagcaatcaaaagaggttcaaaaatcagagttaggttgttgtaataaaacttcctctcgttctatttatttctatgtatacattaatgaaataacagggataatatttatatacacctgcctcattatagcaataagcacttttcatcagtggatacatgagtgaattgtcagcggggaaaagctccagacatgttattaaaagatatgtctccaatgtaattcaattttttggtcttaataaaaatttacaggctgggcacggtggctcacccctgtaatcccagcgcttgaggaggctgaggcggatggatcgccggagctcaggacttcgacaccagcatgggcaatattgcaaaaccccatctctgaaaaaattcaaaaattagctgggcatagtggtgcacacacctgtaatcccaccaccacgcccggtatatttttagtacagacagggtttctctgtgttggtcaggctggtcttgaactcccaacctcaggtgatctgcctgcctcggcctcccaaagtgctggaattataggcgtgagccactgcacctggccctaatttttgtttttgtttttgttcttgtttgagacagagtcttgctttgttgcccaggctggagtgcagtggtgagatctcagctcactgcaagctccgcctcccaggttcacgccattctcctgcctcagcctcccaagtagctgggactacaggcacctgccaccacacccggctaattttttgtatttttaaaagagacaaggtttcaccgtgttagccaggatgacctcgatctcctgacctcatgatccgcccgcctcggcctcccaaagtgctgggattacaggcgtgaaccactgtgcccggccaatttttgtatttttagtggagatggggtttcaccatattggccaggatggtctccatctattgaccttgtgatctgcccacctgggcctcccacagtgctgggattacaggtgtgagccaccatgcctggcctgcccatctttttttgttgttctttttttcttttcttttttttttgagacaaagtctcactctgtcacccaggctggagtgcggtggcacgatcttggctcaccgcaaccaccgcctcctagttaaagcaattctcctgcctcagcctcctgagtagctgggattacaagcatgcgccaccacgcccagctgattttttgtatttttagtagagacagggtttcaccatgttgggcaggctggtcttgaattcctgacctttagtgatccgcctgcctcggcctcccaaaagtgctgagattacatgtgtgagccaccacacccggcctgttttttttttttttttttggttaaatgatacacttcctatttatcatttccatagtcatctcaatgtcccctaaaatccctctaatatggccgggcacggtggcttacacctgtaatcctggcactttgggaggccaaggcgggcggatcactggaggtcaggagttcgagaccagcctggccaatatggtgaaaacccgtctctactaaaaatataaaaattagctgggtgtggtggcacacgcctgtaatcccagctactcgggaggctgaggcaggagaatcgcttgaacccaggaggcggaggttacagtgagtagagattgggccaccgcactccagcctgggcaacagggtgagactgtctcaaaaaaaaaaaaaaaaggaaaagaaaaaaaaattcctctaatatataagtgaatatttaatgaaacaattttttctgtctaggaaatcctgccagaacactttgcacctgtaggaatttgtactataattacaaacacatatatggcaattaagacatgtaaatgtaggtcgggcatggtggctcacgcctgtaatcccagcactttgggaggcccaggcaagtggatcacgaggtcaatagatcgagacaatcctggccaacagggtgaaacctcgtctactaaaaatacaaaattagccaggcgtggtggtgagcacctgtaatcccagctacttgggaggctgaggcaggagaatcacttgaacctgggaggtggaggttgcagtgagccaagatcgcaccattgcactccagcctgggcaacaagggcaaaactccactcaaaaaaaaaaaaaaaaaaaaaaaagacatgtaaatgttacattcagagggacacattaatttccatttcttttagaaaaagtttttacacattgaaggaataaaaatgcatgaactgaccctgatgtctcctgcctggggcccccagttggtggttcctgttcaggatctccactttatcctgctccgtttaagtccagtctcaagtctttctactcacactaaactccttttgtacctacattatgatgatgatgattattttcgagacagagtctggctttgtcacccaggctggaatgcagtggtgcaatctccgcttgcttactgcaatttccgcctcccgcgtttaagcgattctcctgcctcagcctctcaagtagctgggattataggcacgtgccaccacacccagctaatatttgtatttttagtagatatgtggattcaccatgttggccaggctggtctccaacttctaacctcaagtgatccacccacctcggcctcccaaagtgttgggattcagtcatgagccaccgtgccaggcctctgtacctaaattatatcatttctctcttctaattgttctttgctatttaacaagcagcaaatagaggaaccctggggtgtttgctataacctgtatatataggctataataggatcttctcctcacacaccctgcaggaaccaccatgctgaaagaagtgagacaattcagggggcagtccctccccagcagagactaaattggtaccatttgttgctatttcagttttgcgaagatgcgcgcttggagcccaagccatggtttctagggctgacactgacttcccacggaattcttcctgtttaagaggttgtagacttttcatgatcctgaaccttgaacgtctccacaactggttaagtacccgtgagatacatttacaggattttttctttcttttcccaatttttttttttttttttttttttgagacggagtctcctctgtcacccaggctggagggcagtggcgtgatgtctgctcaccacaacctccgcctcccaggttcgagcgattctactgcctcagcctcccaagtagctgggactgcaggcacgccccaccatgcctggctaatttttgtatttttagtagagacgggcttttactatgttgggcaggctggtcttgaactcctgaccttgtgatccacccgcctcggcttcccaaagcactgggattacaggtgtgagccaccgcgcccggccacaggattttttctttttaatgttaggagtttcattgattagtgaacatctggactattgatcatcttgatttagatgggatcttgtaattttttaaacggtggcgaaattctttttttaaaaacttagtatcagattggttaagatattaactattcgttcatgagagttcatatatatatagttcatatatatatagttcatatatgtatatagttcatatatatagttcatatatatatagttcatatatatatagttcatatatatatatatagttcacatatatatagttcatatatatacatatgagacgtagtttcactcttgttgcccagactgaagtgcagtgacgcgatctcggcttactgcaacctccacctcccaggttgaagcaattctcctgcctccgcctcccaggtttaagcaattctcctgcctcagcctcctgagtagctaggactacaggtgtgcaccaccacacccggctatttttttttttttttttgtatttttagtagagctgggatttcaccatgttggctaggctggtctcgaactcctgacctcaggtgatccgctcgcctcggcctcccaaagtgctgggcttacaggcgtgagccaccgcgcccggcctcgtgtatatttttaaactgtgtgctgacgacagttaagtaaatgtgattcagaacttctgcgtattttgcaggacagttttgacacaatgacatgactcgctagccaggaaagataacgacatccagtcctggagctgctggttaaaaacgaacgtgtcaccgggtcccctgggtctgaggccacgcggcacgcggcccctccgcgatattcccgcacctcgcggggaaaaggccgctcggcggccgggcctgggctcgcgggccgccgcctatccgcaccccggcgtccacgccgggttgggggccgctgcgtgcctggcgcccgctgtgaccttgggcctggtcccgcccgccgcgcctaaggcgctgccaggccgggctcagacccccgagctcccgcgcccgcgccaaccccgcgccagccccgatcccgcgcgggctgccgactgtccgccccgggttttccgcggcgcccggagtcgggactgcgtcgggcgtcgccgccggacgtgccggcagcttggtgcgacgtgtcttgccattggcctgcttcggtagccccactgccgtacgccgcccccattggccggcgtaaccgtccgtcagcgaggggcgggcccggcgtgccggctcggtggcgcggccgcgcgtgctcccgcccctcgccgccgctcgctcgctcgccggccggcggcctccgctcggccccctccctcagctccggtgcgcggcggccgacgacccgcgcggcctgggcctcggcccgcgccaccggcgcccgcgcggagcggcccgggggccctcacgcaggcccatggcggcggccgcggcggcgctctcgggcgcgggcacgccacccgcgggcggcggggccgggggcggcggggccgggggcggcgggtccccgccgggcggctgggccgtggcgcgcctggagggccgcgagttcgagtatctgatgaagaagcgctcggtgaccatcggccgcaactcgtcgcagggctcggtggacgtgagcatgggccactcgagcttcatctcccggcgccacctcgagatcttcacgcccccgggcggcggcggccatggcggggccgctccggagctgccgcccgcgcagcccaggcccgacgccggcggcgacttctacctgcgctgcttgggcaagaacggggtattcgtggacggcgtgttccagaggcgcggggcgccgccgctgcagctgccgcgcgtgtgagtggcctcggggcggggcgggcggggtctgcggcctgcagcgcctggcaggacgggacgggacacgcgcccaggcccgggaccacccacgagcgggggcccgactctcccacagccgggaccaccagcgggacccaggccccggctggatcccaaccctcgacagcccctggccccgacccccgtcctcccggtccccttcctggcaggtgcagccccccgtctttcccccttcctggagccggggctgcgggcggctgcgcgcgcgggtcaaggtttctgggttctgtgcgtgcggggagttcacgtgtgctgtttctattctgcagcgaggtcgcgctgaacagaaatgtgaaaacggtgtgcggtgggaggaactgccccgaactaaaatctatgtctcttaaccgatgaagggttgtctgttgtcttttgttgttgttgttgttcagtcgttttcagtagtgagctgtttcaagagtgcggtgttttaagcaggaaggactcctttttccctgccgtgttttcagtaggccaaattggaagacgcttcaagcatgatggattttcaatctgtgctctgaaccttaaaatttagggaaaactagatgcttttcgcataacttctacaaaaagacagttgattaggaattattacaaggtcatgtagagtgttaagtcagcctgatagggaactgcctatcctgctacaaaacaatttagcttggtcctgtggttttatgaagttatcgtttactctgcttgaaacacaaacttgctgtctaggaaatgctaattattcctcaggggctcacttctagatcattgcaagtacagcctttgtccacacaaactggaatttttttgttttttgttttttgagacggaggctcactttgtcgctcaggctggagtgtagtggcgcgatcttggctcactgcaatctccgccctttgagttcaagtggttctcctgccccagcctcccgagtagctgggattacaggcgcctgccaccgcgcccggctaattttttgtatttttagtagagacggggtttcaccatcttggccaggctggtattgaactcctgacctcgtgatccacccgcctcggcctcccaaagtgctgggattacaggcgtgagccaccgcgcccggcctacaaattggaatttttaacgctttcggttgttggagatgctggtaagagctgttgcttttcttcttgacttgcgtgttgtgtgtgtgtgcatgcgctgttctgtttcttagcatggaaaggtgcaccagcatattccttaaactttggtagtagcattttaaagaatgttattttcaggccgggcgcggtggctcacgcctgtaatcccagcactttgggaggccgaggcgggtggatcacgaggtcaggaggtcgagaccattctggctaacacggtgaaacccgtctctactaaaaatacaaaaaaaaaaaaaaaattagccgggcgcggtggcgggcgcctgtagtcccagctactcaggaggctgaggcaggagaatgtgaaccctggaggtggagcttgcagccagcgagatcgcaccactgcactccagcctgggggacagaggaagactccgcctcaaaaaaaaaaaagaaattttcaaatgaaaatgctatttatgtgtgtttatactgtagacggtatgaaatcaatggtagggtcctaatggctaccctttaatctgacttttttttttttttttttttttttacaaaatactgtgtcacaacaaaggaagtttgcgtctactgtgaggatcttgagtttttgtttgtttgtttttgattttgagacacggtctctgtgacctagcctggagtgtactggtatgatgacagctcactgcagcctcaaacttctgggcacaagcgatcctcctgccccagtgctcaggagtttgaagttgctgtgagctatgattgcaccactgcattccaggctgggattacaggtgtgagctatgatctcaccactcctcccacatacctggccaagattttgagttttttggaatttttttttttttttcctgagacggagccttgctctgtcccccaggctggagtgcagtggcgcaatctcggctcactgcaagctatgcctcccgggttcacatcattctcctgcctcagcctcccgagtagctgagactacaggcacccgccactacgcccagctaatttttttttgtatttttagtagagacggggtttcaccatgctagccaggatggtctcgatctcctgacctcatgatctgcccgcctcggcctcccaaagtgctgcgattacaggcatgagccactgtgcctggcccgattttgagtttttaaagaaaattctcctcaccattcagccagaacgatttgtattgaattgaattctgcacatgctaacatgataaacatggagataagttgacctttcagtgagggccagaattcagaccttatttttttgagacggagtctcgctctgttgccaggctggagtacaatggcgtgatcttggcttgctgcaacctccgcctccctggttcaagcaattcttgtgcctcagcctcctgagtagctgggattacaggcacacgccaccacacccagctaatttttgtatttttagtagagatggggttttaccatgttggccaggatggtcttgatctcctgacctcgtgatccacccgccttggcctcccaaagtgctgggattacagctgtgagccaccacgcctggccgaattcagaccttttgaacagtaggaatgagtcttgcagtagagatgagtaagaagggcagtgagatggaggctgggcctcccacttgtgctcagggaagagtcttgtggccaccgaggtgaacatgtatcctggacttctcatgggcctgggactctctacccgtactgagtacacaaggggatgagtggcttttttcacagaggggagtttagcatttgtgcggtgtgaattaaattattaacctagaggatatttcagcacttccttttttgtaaggtatcatttccaaatttgtggtgtagggcagtaacacaggttaatggaataaatcataaagaattggtaccagtgaaatgcagataaattgtttaaaatcttttttttttttttttaagacagagtttttcgctcttgttgcctaggctggagtgcaatggtatgatctcggctcattgcaacctccgcttcctgggctcaagcgattctcctgcttcagcctcccgagtacctgggattacaggtgtgcactacaccaccgcacccagttaattttgtatttttagtagagacagggttaatccatgttggtcaggctggtcttgaactcctgacctcaggtgatctgctcacctccgcctcccaaagtgctgggattacaggtgtgagccaccacacctggccctaaaatctttttttctgaatttaagctcagtgttcaggttgatgatacaagttctttttaagtttaaaaatcaaattaaatgtataagcttgaaagcacacgtaacttagagtaattatgtaaaggccaaagtattattacgagtctcactctgttgtccaggctggagtgcagtggcgtgatcttggctcactgcaaccttggcctcttggattcaagccattctcctgcctcagactccccagtagctgggattaaggagcccaccaccaggcctggctttgtgttttttgtagcaacagagtttcaccatgttggccaggctggtctcaaactcctgaactcaggtgatccgtcccgcctccgcttcccaaagtgctgggattataggtgtgagccactgcgcctgtcctaaggctgaaatattattaatgcttatttcagatttgtctactaaatttaacatcactgtagagttagaaaataatgtaacaacccgtcgttggtctcttatttgaaccacaatgattttattcaaattccaacttcaaaatgaatttatgttttgaatttatattaaaaattatcagaaaatttgcaagagtacataagtagtttaggtttaaaatttggctcatttcattgaaataataatgtattaatgtgggggaagagagaaagatgaggactatgatcctgtccttgtctgctgtattttaataatttgactaagatgtggatccaagtactgtttccacagtggctggggagcctcgagcccagtgtgattggtgggggctcagtgtgtacaaagattgtcagggtgtgtggttttctggaaaacaaatggcttcttcaagtccttgatttttggatacacaggatgcagggctgtgtgtaaggaaaggcagcgttttcctctcttagagcctctgactgacctgaggcgcaggtgttcctgggagactggagggtgggctccatgggggtgtctgggccccacctggcagggctcttggcagtgagccagtggaggttgcctcccacgtgtggctggccctgtagcctggctctggagaacctgcaattcaggctggaagagactttggagcagctggagtgtgaggtctgcctgggtctggtggggagtgtttttactttgccagtgatagactgaaatgccctctttgaggacaaggtggctttttttttttttttaaatcggtctctgtctgtcgcccaggctggggtacagtggcacgatctcggctcactgcaacctccgcctcccgggttcaagtgattatcctggctcagcctcccgagtagctgggattacagatgcccgccaccatgcccggctaatttttgtatttgtattttatttatttatctattaatctattttttgagatggaatcttgctttgttgcccaggtgggagtgcagtgacgcagtctcagctcactgcagcctccgcctcctgggttctgggttcaagcaattcttctgtctcagcctcccaagtagctgggactacaggtacgtgccaccatgcctggctaactttttttgcatttttagtagagacggggtttcaccatgttggtcaggctggtcagaactcctgacctcaggtcatctgcccacctcggcctcccaaagtgctgggattacaggcgtgagctactgcgcccggtcgaggacaaggttcttatttgtccaagggcctggtctggaggctatgattagtaaagtgttttttaggaagatcaattggacaggacagtttgggtttgttgttgctatttttgttgccatggtaacaaactaagtataatttatgaataaaaataggcaactctttaacagttgtttatactttgaaaatgtcaaatgaatttgacacattctgatcagtaagatcccagaatatctaatagtcaaatataaatagaacaagttgaatttactattgcctacaactatttaacgtgctaaattaaaactctgtttatttagaagagtgacccctgtcctatgccaaatgaactctatcagttctacccagtggtaattccacactttctttcttacgtggcctgaatcccacactttctttcttacgtggcatgaatcccacactttctttcttacgtggcatgaatcccacacttactttcttatgtggcctgaatcccacactttcttatgtggcatgaatccctcactttatgtggcatgaatccctcactttctttcttatgtggcagattgtgtttggtaatgtcagatttgaagacttgtttattaaatcagagacagtatcttccaaggtgaagactggagagagatgagccgacagtcagtggcttctggagctttccaggtggagactccaataaatgaattgagggaactcacagtgattctgtcctactcagaatgcagatgggcagaactgagcttcccggagaatcccagtaccagaaagaagaagtaagaaggagggggtcctgggaaggagatggccaagggacatggcttggcaatcaggaagtcttgggcagcctttgagagggctgttgtctccaggataaggaaggaggctggacatagggctggagaataaggaaggagtggaggtagaaggagtgcatgtaaagtggggaccttgtaaggagagcagagttgagattagggttaggaggagcggaaacctcatcactaaggtgaagtggctgaaggaaccaccaagaaatgggagttgaggctgggtgcggtggctcacgcctgtgatcccagcactttgggaggccgaggcaggtggatcatgaggtcaggagattgagaccatcctggttaacacggtgaaacctcatctctactaaaaatacaaaaaattagctgggcatggtggcgggcacctctagtcccagctacttgggaggctgaggcaggagaatggcatgaacccaggagattggagcttgcagtgagccgagatcgcgccactgcactccaacctgggcgacagagcgagactccgtctcaaaaaaaaaaaaaaaagaaagaaatggagttgaggcctggtcagctctttgccgagtagacagcagacgatgtctgaaggaggacagctcccagtggaaaagaaaacgagattgtgttgtttgaagagctgagcagagcgggtcggaacggagctactaggaaagtctggtgtgtttccgtattgaagggctgcaaggtggctgaaatgccttcgttttgcgacctgaaactcctgacaagcttgtgagtggagctgagcctgggacacaggagttggcatgtgttggcataaataaagggatgttcatagcagagggcaaatggcgctttgcactttgaaaagtgttcagtgtacaaatcagttgcctttaataactactctgtatttaagctccgcctcctgggttcaagcgattctcctgcctcagcctcccgaggagctgggattacaggcatgcaccaccatgctggctaatttttgtatttttggtagagatagcttttaaagaaattttggctgggcccggtggctcttgcctgtaatcccagcactttgggaagccgagacaggtggatcatctgaggtcaggagttcgagatcagcctggccaacatggcgaaactccgactctactaaaaatacaaaaattaactgggcatggtggcggatgcctgtaatcccagcaactcaggaggctgaggcaggataatcacttgaacccacagggtgaaggttgtggtgagctgagatggcgccactgtactccagcctgggtgacatagcaagactttgtctcaaaaccgaagatattcatttggcaaattgagatacattgttatcactgatttgtagacacagaacacattgcagctattttagcataattgttactttaagttaaaaacccagtaaccaacttacttctgcctcaccttagtgtttagtacttcttccagtggtaaaactctgtgttccttttattttattatttagagtctcactctgtcacccaggctggagtacagtggcaccatcatagctcactgcagccttgaactcctggactcaagcgatcttcccacctcagtctcccgtgtagctgagagtacaggcctgcatggccattcagggctaatttatttttttttggacgtggggtctcgctatgttgcccaggctggtcgcaaattcctgtcctcaagcagtccccccacctcagtctgccaaagtgctgggattacaggtgcgagccaccctgcctggcctatacatgttttcaagtgctgatcatttattaatagtgaagtgattgtagtcaggcgtggctcccccatttactggcaggtcccatttagacctgcggttgcagaagtacagcacagctctgtgcatgattggtggaaatattccaggagatgaggctgttacagtaacagcagatttttccattgtgaaaatgtaactattcctgctttgttgaagagaaagatttttttggaaaatgaagaaaagaggatttctaaattaaggaagcttttagtgaaagcagttggcatttgggtagtagtattcttatctgtttaacatttttgtggggctcttgttttcttttatgtttggtttttggagcaatttataatatcttaaataatgacagtcatagtaaatcaacctccacactttttcatgaggaatttttgaatttgctgctaaaatgcagtacaggagggcatgtttaaggcacacattaccatctctacaatgtgaagcgggctttgagcacggaacaaggtgttacagctgtacctaggaagtggtggcagggagaccagaaagtacctcgtgccagagccacagcccctgcggccctgctttcctcgtgcacgtcagtttagagtgcacattgggcttcaaacgcctctgctgatttgttaggaacagagaaggtgctctgctgagaattccgtagatttctagacagtatttggtttttgctgcagtttgtcatttgagatggaatgcttgtgttctttgtcctgtgaagggcattggagtacgacaccggggtgagtctgcctccttcccctccctgggacgtatgacagtgtctggaggcacatttggttggcatagactgggaggacgggtgctactggcatctagtggacagaggccagggatgccactgaaaaatcttacaacgcacaggacgcaggaggggagagccgcctgttgcgtagcaacctggcagctgataatataataaaagttggttatgactcttggtcctactggtggtaagttttaataattttttttacagatgattcctgcttaaaacctttatgctaccaaagcatctgttcaaattatacttgaaagcgccttttttttttttttttttttttgagacagggtcttgctctgtttcccaggctgaagtgcagtggtgtgatcttggctcattgcagtgtccacctcccgggttcaagcgattctcctgcctcagcctcctgagtagctggaattacaggcacgtgccaccacgccggctaattttttttttttttttttcaagatggagttctgctctgtcgtccaggctggaatgcagtggcacgatcttggctcactgcaacctccgcctcccaggttcaagtgattctcctgccttagcctcctgagtacctgggattacaggcgcgtgcccactcccagctaatttttgtatttttaatagacagggtttcaccatgttggccaggctgatctcggactcctgacctcaggtgatccgcttgcctcggcctcccaaagtgctgggattacaggcgtgagccatggcgccccacctgaaagtgccttttgtaaaacagagcctggaggttgagactcattgcggagtcactagataactcctccctttgcagctttgaaaggacactctcggaatgcagttctgtcttgctatccctggttgtaagaagatacaactaggtcccttaaggcagtagtagcctaacattgttacgtttgtaatgtgttctcttagtcgtatttattgacttaattaggctgatacagatattctgagaactaggaataccttagttacattgatacagatattctgagaacgtttatctttagtgggaaaaaagacaatgagctgtagctgaattgttccagttttttgtgttcctggttccactggagaatgaactgatgatgtgacgtcattgttagcacagccacgctgggaaagatggctctcaaggtgctgtttttaatggtgtttagtcattaataattggcagtaagaaaactcatcttttgactttcatttggacagatggaatatagaaaacctgaaataggccgggcacgttgggtcacgcctgtcatcccagcactttgggtggctgaggcaggcggatctcctgagatcgggagttcgagaccagcctgaccaacatggagaaaccctgtgtctactaaaaatacaaaattagctgggtgtggtggcgcatgcctctaataccagctactcgggaggctaaggcaggagaatcacttgaactccagcctgggcaacaagagtgaaactccatctaaaaaaaaaaaaaaaaaaaaagagagagaaaacccgaaataaggaaatttaaaactactgatgtgttttttttttttttttttgagacagagtctcgctctgtcacccaggctggagtgcagtggcgccatctcagctcactgcaacgtcctcctcccgggttcaaacaattctcctgcctcagtctcccgagtagctgggattacaggcgccaccaccacgctctgctaatttttgtatttttagtagagacggggtttcaccatgtgggccaggctggtctcaaactcctgactgcaggtgattcccctgtcttggcctcccaaagtgttgggatcacaggccaaagtgtgagtcactgtgcccggtctactgttgtgttttcaaagtggcttttttggtcttgtatttttcagaatacgatagcattttgagtatatagagaatgttttaaaaattctgtgtttttgccatttctgagctgttggaggatgttaggataatgaacatcattttgatagccatttgagctgggtggaagaagatgtggtttaaatataaaatgtctgttctgggtcctccttgaggacctgttcccactttgccaagcttccccctggacttgtccacacgtgattaaacacagctgaaatcctgtacacttgagtgaactgcatgtaagtgttctgtgggctgggctgattcatctttacattgtacacttcctggggttgtagcctttgacccctgggtgacctcctccaggaattctgggtactcgataggactcaaatgtttattgctgaattggttggatgtgggcttctgagtttggattgggtgactactgtaccataggaaaccatgtaaaacagttataaatgtaagtcagattaaattcacttctgattctacagttgctcccacttttttttgtttttgttgatggtagactccccaaagtgacttttttggccttgtacagtcatgcatcacttaactgtggaaatcattctgagaaatgcattgttaggtgatttcattgttgtgcgaacatcatagagcatacttgtacaagcctagatgacacagcctgctgcacacccaggctgtgtgtatatcctgttgcgcctacagccacatgctgcacaaacttaagcaacatgtgactgtattgaatgctgtaacatggtgtttgtgtatctaaacatattaaaacatagaaaaggcacagtaaaaataaggtacaaaagataaaggtacagctctctagagcacttagtgtcagcagagcttgcaggacggggtgagtcagtgagtaaatggtgagtgaatgtgaaggcctaggacgtgactgtacaccgctgtcaacttcataaacactggacatttaggctatactttatttatttgagaaggagtttcgcttttgtcgcccaggctgcagtgcaatggcgtgatcttggctcactgcaacgtctgcctcccaggttcaagcagttctcctgcctcagcttcccgagtagctgggattacaggctcacgccgccacgcccggctaattattttattttattttattttagtagagatggggtttcaccatgttgtccaggctggtcttgaactcctgagctcaggtaaacacctaccttggcctccctaagtgctaggattataggcgtgagccactgtgcccatcttatttatttttttgagatggagtttcgctcttgttgcctaggctgcagtgcaatggcgcgttctcggctcactgcagcctccgcctccttggttcaagcaattctcctgcctcagctttccgagtagctgggattaccagcacccgagaccagcccagctagtttttgcatttttagtggagacggggtttcaccatgttggccaggctggtcttgaactcctgacctcaggtgatccacccacctcggcctcccaaagtgctgggattacaggcgtgagccactgcgcctggcctaaatgtatttaaaaagagttttcttgtcaggtaaaagaaaaaaattgtaaataatttattagtcttaacatactataatttttttttactttataaactaatacttagtttaaaacacacattgtgcagacataaaaaaatatttttgttgtttttttctgagactacgtctcactgtgtggcccaagctggagtgcaatggtgtgattgtggctcactgcaacctctgcctcccgggttcgagtgattctcctgcttcagcctcccgagtagccacctcacctggctaatttttgtatttttagtagagatggggttttgccgtgttgaccaggctggtctcgaactcctgacctgaggtgatctgcctgctttggcctcccaaagtgctgggattacaggtgtgagccaccgcgcctgaccacaaaaatatttttgtattcttatttgataagcttttttctgtttgtaaaattattatttttttctttttaaactttttttgtttaaaaactaagactgaaacacacactagcctagccctacatagggtcaggaccagcagtatcactgtcttctacctccacatcttgttccactccaaagttcttaggggaagtaacgtgcatggagctgtcacctccggtgataacggcttcttctggatacttcctgaaggacctacctggggctgttgtatagttaactttttaaaaataagtagaagcagtatactctaaattaacgataaaatgtatagtgctgccgggcgtggtggctcacgcctgtaatcccagcactttgggaggccaggcgggtggatcacctgaggtcaggagtttgagaccagcctggccaacatggtgaaaccctgtctctactaaaaatgcaaaaaattagccaggcatggtagcacacgcctgtaatcccagctactcgggaggctgaggcaggagaattgcttgaacccaggaggcagaggttgtagtgagccgagaccgtgccactgcactccagcctgggtgatggagtgagactttgtctcaaaaaaaaaaagtatagtgcagtgaatacataaccagtaactgtcatttattattattaagtattacatattgtacgcgatcgtatgtgctgtactttcatacggctgttcgcgtagtaggttcgttgacaccagcatcaccccagactcatgagtaattcattgcactatgacatcacaatggctaggaataggaatttttcagctccatcataatcttaacgggaccctcatatatgcggcccatcattgacttgaaacgacgtgaattttgttagccgggcatggtggtgcccagctgtaggttagccgggcgtggtgacgcacagctgtaggttagctgggcctggcacagctaggttagctgggtgtggtggtgcgcagctgtaatcccagctactcgtgagactgaggttggaggatcacttgggcccaagaggtggaggctatagggagccgagatcacaccggtgcactccagcccaggcaacagaaggggagaccctgtctcaggtcgataggtagataagatagccgggcatggtggcacacacttgtagtcccaactgagtaagacactgtctcaaaaaaaaaaaaaaagagaaaaatagccagatgttgtggcaagggcctctagtcctagctacttgggaggccgaggtgggaggatcacttgaccctcggaggttgaggctgctgtggactgtgattgcactattgcactcaagtctgggcagcagagcaaaacctcgactcgaaaaaaaaagaaaagatggctgatatgtagaggggtaacctgtggaagcctggctgcacatggacaaaatttcttgtgattgaataaaaatgttctaataatgtgtgtcagggcacatgacttgtcgtactgcttgatagttgttgcggctctaatataggaacaagtcagaccatgaagttggtggcttgttgttcccgagtctttgcaccgggtgctgctcttctgcttctcctgcagagcatgtgcacagacctggctctaggtcgtcatgcctcaggctagaggaggggccaggctccttcttgctgagaactttagcagagctctggaggagaccctcctgggactgcgctactggagcacatccttatcgcacatgagatggtctctagctctgatccttctcaccacacacttcagcccatccaggtttgactttagtgactgggtgcctcagcactcactcctgttcctgtctcctcttacagatggtaacgaactcgttgaaacatgtccccagaagtaatatttattttccatggatcttttatcttgttctctcttaaaagttgtttttcaggctatgccttttcttgttgacacaaatctacctgttaattattgagtgctgaaaaacacacattttttgggggcaggttcttgctctgtcgcccagctggagtgcagtggcaccatcttggctcactgcaacctccacctcccaggtttaagcgattctcctgcctcagccttaggagtagctgggattacagatgcctgccaccacacctggctgatttttgtattttttgtacagatggggtttccacatgttggttaggctggtctcgaactcctgacctcagcttatccacctgcctcagcctcctaaagtgctgggattacaggtgtaagccaccgtgcccggccttggccttcgtgatttctgatgagaagtcagctgttaacagttatccagtcgcttatctcttgctgctgtcaagattctctctttttttgtcttttggctttcaacactgattaaaatgtgtttcattttgggtcctgtgagtttatcctacttggagtttgttgagcttcttggatttgtaaaatttttgtctttcattaaactcgaaaaggttttggccattattttttcagacattctttctgcccatttcaaacttccatggttggttggtgagctgacatctcacaggtcctttaggctctgctcgtcttctttgttctttctcctttctgaggagacttgcgggagcagaatctcagtcttcccatcttcaagtttcctgattcttcttgtgcctgctcagatgtgctattgaactgctagcatgagcttttcatgtttgtcattgtaccttttaaaagctccaggatttctgttttgttcctttttatgctgtctctgtcgatagtcctgtttggttcacacacacgttgttttccttatctcttttagttgtgtgtttttgtttttgttttttttttgagatggagtttcacttttgttgcccaggctggagtgcagtggcgcgatctgggctcactgaaacctcttctggttcaagcgattctcccgcctcagcctcccgagtagctgggattacaggcatgcgccaccatgcccaggtaattttgtatatttagtggagatggggtttctccatgttggtcaggcgggtctggaactcctaacctcaggtgatccgcctgtctcagcctcccgaagtgctgggattataggtgtgaaccaccgtgcctggcattttttttgtatttttagtagagatggggtttcaccgtgttggccaggctggtctcaaactcctcacctcaggtgatctgcccatctcggcctccccaagtgctgggattacaggtgtgagctacggtgcccggcctgtgtttttatttaagtttttgagcatatttaaggcagttgtttcaaagtctttgtctagcaaatccagcatctggccttccccagaatagtttctgtcagtttttatttctttgactgagtcatactttcctgtttctttgtgtgccttgtgatttttgttgttgttgcaaactggacctgtgatgatgagaacgcagtagctctggaaatcagattcttctcctttccttgggtttggtggggttttttgcttgccaaaggatataggggcccttttatttaacgacttttccaagctattgttattgcagactatcttccttcgttatgtagtcactgaagtccttgttcctcagcttgtgtttagttggtgttttgacaaagatttccttgaatgccaggaactcttacagtctttacgaactggctctgtgcctgagccctccttgaactcttgatgggcttgcccttggcctagggatcagcccagagtgaaagcaagctcgaggccgaggaggtcttcgcagagggggccttttgccctgggcatgtgtgtagctttctgaattttccagcacacactgaggcctctgaatgtcctgatttcccagaaacacacccaggttttcgccttaggcagtctgttgtatgttgggactgtaatcttctgccccaggcatctgagagttaaatgggtttgaaatgtttttaagctttttttggccttggatctgacttaggcaaaacagaagaggagtgccttgtgtcagtcagactccagacacattagaacagacacacacaatacattttgaatgaggtctccagcagcttctggtaggcacttaaggttagaaaacattgtttaggaaaagaatagaatataaagcttagcggttggttgtagaaggttcttgctgctggatccactcagctcctgggcagttggtgggggccagcctccagctgaccagtgagtgggatgctgggctggagctgctggtattatgttaggaaggttattcctgagaaattcagatacttgttgactgaattggtatgatgcttatagtctttcttaaatgattaaagtttaacatattattaaatttaaaaatattgtgaaataatacttcttgtagaacatttagaccgtaaaagtggatgtgaaaaattatccattgccgggcgggcacggtggctcacgcctgaaatcccagcactttgggaggctgaggtgggcggatcatgaggtcaggagtttgagaccagcctggccagcatacaaaaaattaaccgggcatggtggtgtgtgcctgtaatcagctattcaggaggctaaggcaggagaattgcctgaacctgggaagtggaagttgcagtgagctgagatcatgccactgcactccggcctgggcgacaagagtgagactccatctcaaaaaaaaaaaaaaaaaaaaaaaggccaggcacacggtggcttatgcctgtttgccaacacttttggaggccgaggcgggcaggtcacgaggtcaagagattgagaccatcctggccaacatggaaaccccatctctactgaaaataaaaaaattagccgggcgtggtggtacacgcctgtaatcccagctactctggaagctgaggcaggagaaccccttgaacctgggaggtggaggttatagtgagctgagattgcaccactgcactccagcctggcaatggagactctgtctccaaaaaaaaaaaaaaaaaaatccgtggccaggcacagtggctctcacctgtaatcccagcacttctggaggctgaggcaggtggattgcttgaggtcaggagttcgagactagcttggccaacatggtgaaaccctgtctctacaaaaatacaaaaattagctgggcatgatggtcggtgcctgtaatcccagctacttgggaggctgagacaggagaatcgtttgaacccaagaggcagaggttgcagtgagccgagatcgtgccattgcactccagcctgggcgactgagcaagactccgtctgaaaaaagaaaaaaaagatataggccgggtgggaggtgggaggattgctggaggccaggagttcgagaccagcctggccaacatagtgagacttctttctctacaaaaaatttaaaaattaggtgtggtcgtgcattcctccagtcctggacacttgggaggctaagatgggaagatcacttgagcccgggaagttgaggctgtagtgagccatgctcgtgccgctgcgctccaacctgggtgacagaccaagatcctgtctccaattaaaacaacattaagctcattttgtcaaaggaaaaattaccgtcctcgcatttgccttcgttgttgcagacagaagaatgcccttgtcctctgctggtggacacagtccccacaggagccgcatggggtttttctgtgtatcatgtatggtgtagaagagcaaaatgctctgcaccgtgttttatagggaatgaaaaagaaccccaccaaacttaggatgcatctttccagccgggcccttcctcaagcccctcactgtcacctctggccccagggcaggcctggggctcaccccttggacaacactgaggcccagcccagagaagggacttgtaccctacgccatacccacagctcacagccactcagcccagcatgggttgccccagccagatctccttccaaaacagttagaagagtattgatgaagagtccttcagaattttgattcttcttcctctcctggtttatcttctggtggaaagaaaaacacgtttggaatgtttaagactgagaggtgatgggatttctttttgaggtagaaaatgtggtatgagaatgggagggagaaatagaaaagtattgaagcttttaaaactgtaaggtggccgggcgtggtggctcaggcctgtcatctcagcactgtaaggtggccgggcgtggtggctcagacccgtaatctcagcactgtaaggtggccgggcgtggtggctcaggcccgtaatctcagcactgtaaggtggccgggcgtggtggctcagacccctaatctcagcactgtaaggtggccgggcgtggtggctcaggcccgtaatctcagcactgtaaggtggccgggcgtggtggctcagacctgtaatctcagcactgtaaggtggctgggcgtggtggctcaggcctgtagtctcaacactttgggaagctgatgcgggaggatcagttgaggacaggagttcgagaccagcctggacaacatagatggaccctgtctctacaaaaaaaatgaaacaattagctctgtatggtggcacatgcctgtgattccagctactttggaggctgaggtgggaggattgcttgaacccaggaagtcaaggctgtagtgagccatgatcataccactgcactccagtctgggtaacactcgagaccttgttttaaaaaaaaaaattaattaaaaaatatatgtaaatgggccgggcatggtggctcacgcctgtaatctcaacactttgggaggctgaggtgactggatcacctgaggtcaggagttcgagaccaggctggccaacatggtgaaaccctgtctccgttaaaaatacaaaaaattagctgggcatggtggcaggcacctgtaatcccagctactcaagaggcagaggcaggagaatctcttaaacctgggaggtggaggttgcagtgagctgggatcatgccactgcactccagcctgggtgacacagcgagactccatctcaaaaaaaaaaaaatatcgataattgaaagagcttgttggacgcggtggctcacgcctgtaatctcagcactttgggaggccaaggaaggcggatcacctgaggtcgggagttcaagaccagcctggccaatatggtgaaaacctgtctctactaaaaatacaaaaattagccgagtgtgatggcggatgcctgtaatcctggctacttgggaggctgaggcaggagaattgcttgaacctgggaggtggaaattgcggtgagccgaggtcatgccatcgcagtccagcctgggcaacaagagcgaaactgtctcaaaaaaaaaaaaaagagttacctttcagaatgggctcaaccgcttgaatgatttggagaattggaggtaagagattttggtgttaatgactttcacttccctgtcttatgtccattcttcctgcacgattgttgtttgtgggtatgcgtccttctgcacgtaatctgtttgaagcctttccagtgatcccatgtctataccccctttcccctgtgtagccatcccattggcctggatgcttggggatggtttgtctactcatgcccctgtcttttctcctggagttggcacactccagtccagcacccaccctcaggcgtaaccctttccttcctcccacacgcctgcccactggatgctactctgcagctgcctctcctgtaagaccagccgtgaaggttcctgctcagatgctttccctatatctgtctctcagtgccatctagggagggagcaaatagttatcaagttagcagtttattctgtcttgaattctctaattgttttatgcccactaacaaggttgacagctgaggtcccatatcagtaagtgagcatttattatttttttcccagcgcatcacacctgggcttgttgaacagaaaagcctttttatgtgttaatactgtgttggcttgaaatggagtggcaccttcgggggctgacagtggcatagcttggagtgtgatctttctcagacaggggtccacagtgggtgtgtgtggcgtgtggctgctgcttcattgtccttggagtaggccctcccagcggttggagggtgtttgagaccaagcaaattcctgtgtgagcagctccgtcttctctggttctgctgatggattcaccttttagcataggtgtcagtgggccaacctcaggggcgtgcagggacagggacaaagggtgtggtataagcacaagtaggcctgaaatagacaggtttctggagttagaattttaaaatagttgtagattctaaataactaatgatttacagtttttttttttttcagtcagagttgtgctgtatcgcccaggctggagtgcagtggcacgatctcggctcactgcaacctccgtctcctgggttcaagtgattctcgtgcctcagcctcccaagtagctgggattacaggcgcccgccatcacgcccggctaatttttgtatttttagtagagacggggtttaaccatgttggccaaggctggtctcgaactcctgacctcctgcctcagcctcccaaagtgctgggattgcagatgtgagtcaccacgcctggccaaatttttaaatgtattaacttgtatctgtgtattacaaattgatacttgtgtgacaatcagatatgacactcaaatgaaaactgataacttttttttcatacttaacacactgtgaactgcattgtacctgtttcaagaggtaggaagggtgatttttttcttaatagatggagtcttactttgttgcccaggctggagtgcagtggtgcgatcatggctcactgctccctcgaatttctgggctcaagggatcctctttacctcagcctcctgagtagtagggactagaggcacaaatcactgcatccagctaattaaatttttttttttttttgagatggagtctcattcggtttcccaggctggagtgcagtgacacaatctcagctcactgcaacctccaccttcccggttcaagtgattcttttgcctcagccaccctagtagctgggattacaggcatgcaccaccacgcctggctatgtttgtattttttggtagagacagggtttcgccacgttggccagtgtggtcttgaactcctggcctcaagtgatccacttgcctcagcctccctccacaaattttttttttcttctttcttttttttttttttgagacagtttcgttcttgtcgcccaggctggagtgcaatggtgcgatctcggctcactgcaacctccgcctcctgggttcaggcaattctcctgcctcagcctcccgagtagctgggattacaggtgcgcactaccaggcccagctaattctttttgtattgttagtagagacgggatttcaccatgttggccaggctggtctcgaactcctgaactcaggtgatccgcccgtctctggcctcccaaagtgctgggattacagacgtgagccaccatgcccttccccagttttttattttattttattttatacagacagggtgtcactgtcctgctcaggttggtgtagttagtactcctgggctcaagcaatcttcctgccttggcctcccaaccgtgaattactgggattacaggtgtgagctgccacacccggcagaagggcagttttggtgttgataggagaaacagcagaggaccctgctggcaggagaggacaggtgcagagtgcggccaaagcagtattaccaagggcttggtcagctttaaaagtagtctctgggctggatgcagtggctcatgcccagtactttgggagactgaggcaggaggatcagttgaggacaggagttcgagaccagtctaaggaacatagtaggaccctgtctgtacaaaaaataaaaaaaattagctgggtgtggtggtgcgcacctgtagtcccaggtactcaggaggctgatgtgagagaattgcttgagcccaggaggttgaggctgcagtgagccgtgattgcagagtgaaaccctgtataaatgaataaacgaatgaatggtccctggtacttaacaggttatttacctggaaaggaaaagtagaataagttaaacttcttcagtgctgttgccagagtggccagtgggtcctcagcagaggacatttcccacgtgggggtttcgtttgatactgtgatttttgtcttaaaactgttatctaaatccacaactatttttaaatgcttagtaaataaaactggacatgctatcagaatattttgagataccttttttattgtgttgtgttgttttagagatagggccttgctctggtacccaggctggaagtgtcagtggtgcagtcatagctcactgcagcctggaactcccgggctcatgttatccggggaggccgtaggtgagaacttctggcatctaaatgaaggcttcttttaaggggcagactgatagctcagtgttgtgtgagcacctgctgtgggggtgccacacccaggagctgagcagaggtccaccacagctgcccacttggagcccagagcttttgcctcttctggcagcttctctttgcttgtttgaatagttctgggctctgctctgagaatggtcatgagaaaccggagcagtaggaaggccatgatagggaagagtctttcttttatttttattttttagtgagacagggtcttgctagagtgcagtggtgtgatcatggctcactgcagccttgaactcctggcctcaagtgatcctgctgctgcagcctcctaagtagctgggactacacgccagcatgcttagcttttttttttttttttttttgagacggagtcttcttctgtcacccaggctggagtgcagtggcgcaatcttggctcattgcaagctccgcctcccgggttcatgccattctcctgcctcagcctcccgagcagctgggactacaggcacccgccaccacgcctggctaattttttgtatttttagtagagatggggtttcactgtgttagccaggatggtctcaatctcctgacctcgtgatccgcccgcctcagcctcccaaagtgctcggattacaggcgtgagccaccgtgcccagccaagctttttgttttttttatagacatgaggtctcactatgttgcacaagctggtcttgaactcctgggctcagttgatcctcccacttcggctttccaaagttctgggattataggcgtgagccactgcgcccggccaagcttttactttgaaaattctttggcttttacattttatgccatgtgcatttatcatctgttagtgacaacaacaaaaatacttattgatcatcttctctggacagtagttaaatggatttattcttttttttatgtaagccacctaatcttccccttaaattagaatatttgtggagaaagtcctagggaaatggcactgtgctggtacagtacacacacacacgccacccaaaaccgtgggcccagagatgctttggaatcagagcagactggattttacaacagtagcacagcgtgtgtactgggtatgatttcttattcccagcactgcgtcatccaacatgtgagcatttctgttgctgaactcatgaatattctcactaagtgggctaattgaagggtataattagttctttctcagtttaggtcagaattggctgccagatgatttcaggtcagattttttggagcttttttgctttctggaattgtggaaaagggattgtggacctttatggggcatagagcgactccaggcaagtcgctgtgggaggggtgtgcagagtgaagtgctggcgggtggccgtcctcagtggctttgggacctggcttccgtccagctctgtgtctgcagtgctactgtctgtccccctttcctcttgggagccagtgctgcccacccaggtcccgggggcgcaccctctccatggtgtgctctgttgctctgcgtttacggagatggaaaaaaataattaaaaaaaaaaaagaattgtcgatctgccccgtctgtcctacttgagcttttctcggacctgtcatctgttcttccttcttccccattgctgctgacctagtggtttctcacttggacttctggaggggtttcttagttggtctccattcctctccactttgtaaaagtatcatctagacacagaaaagtgcacagattctaagtatagctcagtaagaaccactggtacggtctgttctagtgaagacgtgacgtcatcagcatccacctctcccagccagggcctcccactcctcagctcggaattcctatcccgaattctaaaccataaattagttttgtttgcttttgaacttcatatccatgaaattgtacagagtcctttgtaggagacggtgtttgttttttattgaatactgtgtttctgaggttagtccatatttttgcacgtagctattggccattctcattactggaaagtagtaacgtggatatacaacgattcaatattctgctataggtagacatttaaagtaattttatttggggctattatgaataatgctgttgtgaatattcttatagtcttttttttgttgttgttggaaggcttttttttttttttcttttgagacagagtcttgctctgtctcccaggctggagtacagtggcacgatcttggctcactgcaacctctgcgtcccaggttcaagcgattctcctatctcagcctcctgagtggctgggattataggtacgcaccagcacacctggctaatttttgtacttttagtagagacggggtttcaccatgttggccaggctggtctagaactcctgacctcacatgatcgacttgccttggcctcccaaagtgctgggattacaggcgtgagccaccgcgcttggccgatgtgttcagctttcttaccaacatgttggaaagcgctttgtgcagttcatagccatttacactgtgtgagatccagttcagggtgcctcagagctgcctcaacttttgacattttctctcttttttattttaggtattttagcaggtattgtggttttaatttgcatttccctaatgactaatgatgttgaagatccttctatgtgcttacttgctaccaagcatggttggttttttttttttttttttttgagatggagtctcgcttggtcgcccaggctggagtgcagtggtgccatcttggctcacagcaacctccgcctcctgggttcaaacaattctcctgcctcagcctcttgaggagctgggattacaggtgcctgccaccactcccgcctaatttttgtatttttggtagagacgggatttcgccgtgttggccaggctggtctcaaactcctgacctcaggtgatccacctgcctcggcctcccagagtgctgggatcgcaggcatgaaccactgcacccagccagcgtggtatattaaaaatactttcctgcacattaacaaatgttcacctctcggtgcagctcgccttgtaagtgtggtggggaagctaggagtctgagtgcacatgcaggagctcttcgctgcaggtcccgagtggagggagaggtaatctgtagagtgccccaagagtgaagtgctgcgtcccagtgtcaaacagaggtaacacctcgcttttcttttccttttttttaaacggtgacgggggtctcaccatgttgcccaggctggtcttgaactcctgggctcaagtgttcctcccacctcagactcccaagttcagggataataggtgtaagccactgagcccaacctaaaactcgcttttaaataaagaactcaggccgggtgcggtggctcacacctggaatcccagcactttgggaggccgaggcagatggatcacctgaggtcaggggattgagaccatcccgcccaacatggtgaaaccccgtctctactaaaaataccaaaattagtcgggcgtggtggtgggtgcctgtagtcccagctactctggaggctgaggtgggagaatcacttgaacccgggaggtggaggtcacagtgagccgagatggcaccactgcactccaacctgggcgacaggagcaaaaactccatcaaaaaaaaaaaaaaaggaaggagaaagaaagaaagaatacactgatctctcttatagtgtatactgtctattactactgattttaaagctacaaccttaagcatcatactccctgtgtttagaatattcagggtgtagtattgtggttcacattgtagtattgtggttctccattgtggttccccggaagtgatcaaggtgatactttacattcagggtgtccagtctttaggctttcctgggccacattggaaaaagtattgtctacactaacaagagctggtaagctgaaaaaatcacaaaaatcataatgttttaagaaagtttatgaatttgtattgggccacattcaaagccatcctgggctgcatgcagcccacgggccgtgggttggacaagcttgttttaagagtttaggaagaaaaataatacttctggttatttttttcatcctgcttagttgctatttttctgttttacagtgtgcaatactgtaatataatttatacatatattaatatattgttgccagcttatttttactttaaacttttttttgaggaatatttcacataaaacaaacttaagggtacctttcaaagagttttgacagctgtatacaccatgtagccgaaatcacaatcaaaataatagatccagatattacccctcaccccaaaccttcctcttgccccttggcagtcagcctcatccccctggagagtcccagacactcaactctgtgcctcccctcccgtagaagtgttttcttccagggtttcataaacatggaatcatgtagaatatactggtgtttggctcgctcttattcacatggtatatttgaggttcatcagtgttacttgtgtgggcagttttcctttgcgattgctgggcggcagctgagtggattctcttctatggatgtacccccatttgtggatccattcacctacggctgactgtctagacagtgtccagtctgggctgctgtgcatcacgctgctgtgaacgtctgtgtaggagtcacatttgtgtgaactggtgctctcacttctcttggcagataactacaagtacgagtggtggggccaggtggtcagtgtgcatttatttcacagaaaagctgacccacttttccagagcagttgcaccagtttgtattcttgctggcagtatgtgacagctagttgctccatatccttgtcagcacttggttttgtcagtcttcttatattagccattatctgggtgtgtagtggtatgtcagtatgtgtatttttttttaatactttggatcatttacatcaaccgtggtttaatttgccttgctgttgagcatctctacatgtgcttttggccatttctatgtcatctgtagtgaatgaccatttttaatgggttgtttaccttcttactgaatattaagctttgtttatataccctgaacagaagtcctttgtgagataggtgtattgtgaatattttctcccattccatcctttgccctgtttgttgatactgtatttcatatattcaaatattgatttctacttaatttttcacttagaggtgtacagtcaaaagcatttggaggctactgctcagctgaattagcagaaggaattgctgtggactgaatagaggaaggaaaggacccaggcgctgtcccacagcctctcccgtgacctcaccctgggggaggcatgggtgtttggcagagagccctttttggttttacgtgaatgtcatttgggcgggtgtggggtagaatgatctcaagagcattctcacctccgaggagcggttgcgtctcgatgcatcggcacaggagggctgtgcactttccactgccaccacccgtgagacctccagagagcctgaccctgccatctgcactaagatccccagctgttgtctggtgatccagatgagaggaccagcgtgatagtttctcacagcagcctctggcaggacctggagtggaaatcttccttagtctaaaacacatcccgaatgactgaacattataggagaatgtgtctttgttttacgaggccacttgaagtccacctccctcctcttctgggtgtggcccttgcctgtagctccgagtgtgaggatcttaagtgtgagggtgtgtgctcctgagccagcctttaccccaacaccaagttgccacaccgaactgcagacctggcagccctgtccagcaacttccttatcacagttacagtgcagcaaatgggagaggggccaaaacccccaaaattattctccttattacagttacagtacagcaaatgggagaggggggccaaacccccaaaattattctccttattacagttacagtacagcaaatgggagaggggccaaaacccccaaaattattctccttattacagttacagtgcagcaaatgggagaggggggccaaaaccccaaaattattctccttattacagttgcagtgcagcaaatgggagatggggggcaaaaccccccaaattactctccttattacagttgcagtgcagcaaatgggagatgggggccaaaaccccccaaattactctccaagccaaaggaaaactctggatgctcgatagccacttacagagctgctcatcacatgcgttgttggaacacctaacactagcctcctggttatgaatgtttctggaatcgagcctccctgatatgtgcctacagaagcggatctgcctgaggacatccgccatttcctaatatttataccttagaatatagagccagcttcataacatgtggggtccagtgcagaatgaaaacatgggacctgtagttgagaaagcaggaaaaggccgggcccagtggctcatgcctgtaatgccagcactttgggagattgaggtgggtgcatcacttgagcccaggaatttgagaccagcttcagaaatacagtgagacccccatctctacaaaaacaaaacaggcaggtgtggtggtacgtgcctgtagtcccagctattcaggaggctgaggcgggaggattgcttcagcctgggcttgcagtgagccatgattgtgccactgccttccagcctgggcgacactgcaagaccttgtctctaaacaaacacacacacacacacacaaagagcttctttatgtcttctgtggattcctggcctgccatagtgtttttaatttgccacttgacttcaagctttcccaggaatacgtgtctgaagcaaggcacccctgttcacaccccaccagggacattggacagttgtgggggaagaagggggtgcaggagcaagatgggctgtgtcccattgaacttcactacagaacaccaatttaaagataaatgattagggatttcaagatgttggcagtaaggcattaaactccatgcctggcccttctgaggcgggcttttttttttttttttttgagatggagtcttgctctgtcccccaggcgggagtgcagtggcgcaatctcggctcactacaagctccgcctcccgggttcacgccattctcctgcctcagcctcccgagtagctgggactacaggcgcccgccaccacgcccggctaatttttgttgtattttttaatagagacagggtttcaccatgttagccaggatggtctcgatcttctgaccttgtgatccgcctgcctcagcctcccaaagtgctgggatgacaggtgtgggccacggcgccggccctgaggtgggctttgtgcagctgtgctggccacacaagcctgaaaccggccttgtctgtatggaaaagttctgtgtcaaaactaggtggtttctaagtcactgtgaagcactgcgtgcagtaagcgtgcgtcactgaaagatgacacttgcaagccagtactgagccgggtcgttaggtgtcaaagcctgttttaagcttcggaggcttaggttagaagatttgtgctgaaaggccggaagtggtggctcacgcctgtcatcccagcactttgggaggccgaggcgggcggatcacaagctcaggagactgagaccatcctggctaacacggtgaaaccccgtctctactaaaaatccaaaaaattagccgggcgtggtggcgggcacctgtagtcctagctactcgggaggctgaggcaggagaatggcgtgaacctgggaggcggagtttgcagtgagcttagattgcacctctgcactccagcctgggcgatagagcgagactccatctcaaaaaaaaaaattaaaaaaaaaataaaaataaacatgatggcatgtcatgagttttgaaggataagaagttaaagctggccaggcacggtggctcatgcctgcaatcccagcactttgggaggtcaaggcgggtggatcacctgaggtcaggagtttgagaccagcctggccatcatggtgaaaccctgtctgtactaaaaaaaattacaaaaaattagccaggtgtggggacatgtgcttgtagtcttagctacttgggaaactgaggcaggagactcacttgaacttgagagatggaggttgcaatgagctgagatcacgccactgcattccagcctgggcaacagagcgagtctatctaaaaaataaaaataaaaaacataaaaatttgaggctgaggtgatagttgctgcttgaggtttattgctgatgacaaagtgtgggctatttagggtttctaatgtatttctcattgtcttaaacggtcttcagctctgtcaagctgtttatttgtaatttatgtgctttaagatgacacttgccactcagacctcctccaaggaggggcaggggagcccattcctgggcctggcacggtgctccacctcctgcacacccctttctggggcaggtccttggactgtggggaagcacctgctgcactctgggtggtggcagccttgggccctgggctcccccttgtggagtcctcagggtgtgaggcaccataaaattattcaaaaaatgaagtggcttccaaacactctccatgtccgcactcccctcgcggtggaccaaggcacacgctcccagcctggccacaggcctagactagtgttgaggtttgcattggacatgttgaaggcttacaaatgtttttctttttcttttgaaattacttcagaattaaagcaaaattgcaaaaatagtacagagaacttccgttttcccagattcccactccgttagtgtttcaccaaacccgcatgttcagtctctctccctctccttaaacattcgaggggcagttgcaaaggtgacgctttccctgcaggcatcctcttctgtgcctgccctggtgagaactgctatggcaactgtgtcctaatggccgaccttctccaggcttcacccaccgtcgctcctgcccttcactgataggccctgtgtcacactgaaccctcctgtcgctttaatcctcttctatgtgtggccatcctcagcctttgtcttctgtgacattgatatttttgaagagcacagcattagtgatttcgtcgaacgtccctcagttaggatttgttggatgtttcctcttgattagatctaggttagttacctttggcaggaactctagaggtgaagttgtgtcctctcagggcaccatggccgtgttaccctggtgtcgttttgtgccgtggacaatgatgctggctgtgagcacttggctgaggtggttgaagagcagcatcccaaacagggctctggagtgcagagtgacctctgcagccactctgctcaagcgtctccgcgtgctctgcaaggctccaaaccggagaggtgctctgtaggtcaccccgttacgtaaaatcacagactggaaagagtttgttagattttctttcttttttatttttggagacagtcttgctctgttgccgaggctgcagtgcagtgacatgatctcggctcattgcaacctctgcctcctgagttcaagcgattctcctgcctcagcctccggagtagctgggattacagtcacgcgccaccacacctggctgatttttgtatttttagtagagatggggtttcactatgttggccaggctgatctcgaactcctgagctcaggtgatctgcctgccaaggcctcccaaagtgctgggattacaggcgtgagccaccgtgcccagccagacttgttttttaaacaggcagaaaggagctcacccatggagcattttttctgagtcgcctgagttatctgtgtcacggcagaaaaggacgtcaggagtctgggggaagcagggccatcctggaggccacagcccaggcaggtgccaaggccaaaggcagctcttctgtgcttgcctctcagagtgggactgcctgggaccagacctgctgctcctgagctgtgttggccctggccttgtctcctctgcatgtcaaggacacatgacctgcttgaatggcaggggcttttgttatgcaggttcccagccatgccgtcactccacagaagcacaaacatggttttcggggactttggatgtttctggaggggtctgactctgggtctgtgttcatgagatccacattcacaggcgtggctgcgaagaggcccctagaccttgggatgtgtgctgagcccttaagacatgaaccaccactagaatcggctaagctccagggacacagcagttgcgcctgtggtggagattgtcccagacggacgtttgtcccgttgctgtgacgcagatggtggatgggctgtggggctgctttcaagtacttttttttttatttcccgagatggagtcttgctctgttgccaggctggagggcagtggcgtgatctcagctcactgcagtctccgcctcccaggttcatgccattctcctgcctcagtctcccgagtatttgggactacaggcgcccaccaccacgcctgggtaatttttgtatttttagtagagatggggtttcaccatgttagccaggatggtctcgaactcctgagcttgtgatccgcccacctcggcctcccaaagtgctgggattacaggcgtgagccaccggacgtggcctcaagtacttttttgaaactggttgtagggaatagtttgacaaatcggctagttggttgaacttgctttgcataaagagacatcactaaatataactctccttaaagttggggacttatttaaatctgattcatttctgtggggctgtatgatgttggttaatactgaagtcttgcaacaaagtctggctttgttcctaaggaacctgtctttggagtccttagagcttcttcgtgagtctgttaattcataaactccagaccattggcctgcacgttgcatttgtaataatttccattcccacaagaaactagaacaggagaatgagagagccaggctgggagaaggatgtttgcgacactgaatccagtttaagttgttggtttgttcaagtgaaggaaatggaatttttatcagggccctctgaacaggtttgaaactttacttagggatttgccattctgctttctgccacctagtgttcctttcctgtagtgcatctcttaacctgtcccttccttccatttttggtcagacgtctcaggcttgtaaacagattcctagtctatactgagcttcattacaaatcttgcagaatccagtgaggttttttttttttttctttttttccaagacagagtctcgctctgtcgcccaggctggagtgcagtggctcgatctgggctcactgcaacctccgcctcccacgttcaagcaattcttcctgcctcagcctcccaagtagctgggattacaggtgtgggccaccatgcccgactaattttttttttgtttttaatagtggcagcgtttcaccatattggccaggctgggttcgaactcctgacctcaggtgatctgcccgcctcggcctcccaaagtgctgggattacaggcgtgagccactgctcccagccccaaataaagtacttttaggaacacacagtgccaggaattgggataggctgactgtatgagacagccccctcatcagcctagtgtcttccagacacttaaactccatcattgaccccaagtgcttctgtggaggaaagttgcagggccagggaagaggcacctcaggccttgggaagtcaggggcccttctagccaagacaccagctgcatgtggacctgcactgagctcattgccctgcagccatgtggggaagacacaggtcccaggaggatctaacccccggcatctggtttcgcccccacctccgttctgttgtaatattttgcggctctttttagtgtcatgaggcaactcatccaaaattattccacagtttttaatttctagttttgaaaaggggaacaaggatttccaaggtaactgaactccatagagaacctgaaaacagttttaatgtatcttgtttcgaatgtaacctacattcaaataaattataattatagtgtgggtgtccatgcagtcacaacccaggtaaaagaaataggtcactgtcaccgggcgcggtggctcacgcctgtaatcccagcactttgggaggctgaggcgggcggatcacaaggtcaggagatcgagaccatcctggctaacatggtgaaaccccgtctctactaaaaatacaaaaaaaaaaaaaaattggcgtgggggcgggcgcctgtagtcccagctactcgggaggctgaggcaggagaatggcgtgaacctgggaggcggagcttgcagtgagccgagattgtgccactgcactccagcctgggcgaaagcaagactctatcacaaaaaaaaaaaaaaaaaaaaaaaaaaaaaaagaaataggtcatggtcagcacaaaagcatagaaaatggcacagtgaacccccacgcctgtcatatgatccacattttgctcatttctacatccatctgcatggacggcttttatttttttaaactgtctattgaagtatactgtctatacagaaaagtgtgtgtatcgtgcgtatgcaactgatgcatttttacacacaggaactctcactgacgcagtcagaatctagatgaagaaaaagcaagttggccgggcacggtggctcacgcctgtaatcccagcactttgggaggccgaggtgggcggatcatgaggtcaggagattgagaccatcctggacaacatggtgaaaccccatctctactaaaaatacaaaaattagcagggcatggtggcgggcgcctgtaatcccagctactcaggagactgaggcaggaggatcgcttgaaccagggagtcgaaggttgcagtgagccaagattgttccattgcactccagtctgggcaatagagtgagactccgtctaaaaaaaaaaaaagcaagttaccaggacatctggatagcttttaaatgtattccatggctcatcaacgtggagaggctcacacttagatgaaaacacagagcacctccctcaccttgctggggctggggctggggctggggctggggctgggcttgttctgtggcagccaggatggaggacgaacagcacatccccatgcttttggtcaggctgtgagcagatggccagcagcaccttcctgcctcttttttttatttttatttttatttttttttgagacggagtctttgtcacccaggctagagtgcagtggcaggatcttggttcactgcagcctccacctcctgggttcaagcgattcttcagcctcagcctcagcctcctgagtaattgggattacaggcacgtgtcaccacacctggctaatttttgtatttttagtagagtcagggtctcaccatgttggccaggctagtcttgaactcctgacctcaggtgatccacctgcttcggcctcccaaagtgctgggatgacaggcgtgagccaccgtgtccagcctctcttttatttttattttattattattattttttattttttttttgagacagagttgctcttgttgcccaggctggagtgcaatggtgtgatgatctcagctcactgcaacctccacctcccaggctcaagcaattctcctgcctcagcctcccaagtagctgggattacaggcaggtaccaccacgcctggctaattttgtatttttaatagagatggggtttctccatgttggtcaggctggtctcgaactcctgacctcaggtgatccttccgcctcagcctcccaaagtgctgggattacaggcgtgagccaccgtgcctggcctatttttattttttatatatatatatttttgagacagaatctcacactgtcacccaggctggagtgcagtggcacaatctcagttcactgcaacctccgctccccaggttcaagcgattctcgtgcctcagcctcccaagtagctgggattacatgcgcgtgccaccatgcctggctgatttttgtatttttagtagacatggtgtttcaccgtgttggccaggctggtcttgaactcctgacctctggtgatccacctgccttggcctccaaaagtgctgaggattacaggtgtgagccactgtgtccggcctctgccttttttaaaaaaactagaaatgggatcttgctctgttgtccaggctagagtgcagtggtatgatcacagctcactgcagcctcaaactcccagggtcaagcaatcctcctgcctcagcctctgagtcactggaactacaggtgtgcaccaccatcctgggtaagtttttaaacattttttgtagatatgtgggggtcttgctatgttactgatgctggtcttgaactcctgggctcaagtgatcttcctgctttggcctccctcaatgccgggattacaggtgtgagcaaccgcgtctggcccctttcctcattttaaatgccctgtgctcctgaggatcctctgcagtggaatgtcctcacagcactaattgtctgttgtctttaattggaaacattggggttgggtacagtggcccatgcctgtgcttccagtactttgggaggccaagacgggaggatcacttgagcccaggagtttgtgaccagcctgggtgacattgggagaccttgtctctacaaaaaatgataataataaaaattagctgaacatggtggcgtgtgcctgtagtcctagctgctcgaggctgagacaggaggatcccttgagcctgggaagttgaggctgcagtgagctgtgattgcgttgctgcactccaacctgggctacggagcgagaccctgcctgaaaacgaaaaggaaacagaaccgatgcaagggaaggatggctcagtgtggcagtgccctgtccgcggagagcactcagccgggtctggacgaggacgttgtgcgtaactctacggagaagtacgagctcacagataatatgggggtgtggtcctgttgtgtgagaagcagacgaaacactaagaggacattgggttccccatcattccagggctactgcccccacaggggaggaagagatcgcctctttccctgttggaattgtgcacactgctggagccctctcctgggaggaccggcggggagtctgttctgctggtcaaggctgggctttctgcagaagttcagggtggacatggaataaatatagcacagtggacaccagatgtgtctgtgggaagaagtcactgttcacatctttacatctttttttttttgagagctctgtcgcccaggctggagtgcagtggcgtgatctcggctcactgcaagctccgcctcctgggttcatgccattctcctgcctcagcctcccgagtagctgggactgcaggtgcctgccaccacgcctggctagttttttgtgtttttttcagtagagacggggtttcaccgtgttatccaggatggtctcgatctcctgacctcgtgatctgcccaacttggtctcccagagtgctggaattacaggtgtgagccactgcgcctggcccacgctggttaatttttatgtttttagtagcaatggggtttcaccgtgttggtcaggctggtctcgaacttctgacctcaggggatcctcctgcctcggcctcccaaagtgctgggatgacaggcgtgagctactgagcctggcttagtagtacagtgtttgatttggtgtcctgagtgtctgtatgtggatgtggagtgcggttttccactgagcttcagtctgaggttgcgcggttggtgctcgctgttcttcccatctctgctactggctggcgaccgtgcggactccacagctgcgctcagctcagagccagcttcgtgtgcagagcccagcagagatggcggagccacttggcatccaagcaccttgccctgtttgtgtccacctggttctgccgtgagaacccctgggttttaagccgttaggctggtatgagagggtgggtggtcctgggaacacgtccccacgtgggacgggctgctcattagcagtgaggaggactcaggagatgatgggtgggagtctagggtggctttcagatcctgctggaacctcgtgccaggctggtcttccttgttgtcctcagaggaggtgacagctgtacacacacaccaccccccacccaccccccttgtttgcagactctagaagtaatgtctgttgaaagggagctaagctcagtcggatctcagatacatggcaggtgatcagttttattatttattatgtatttatttagagcagcactgaaagcttattaaaaagctttagagcaggaaggaaaagaggtaaagtacacctggaagagggccaagtgggtgacttgagagattaagtgccggttttcttctaaaatgtagtgataaacaggtgtttgcatctggaaagtctaaagccagcagtgaatgccactgaatgtgaagtgttgcagatctttgctctggatagacttttttttttttttttttttttttaatggagtctcgctctgtcgccctggctggagtgcagtggcaggatctcggctcgctgcagcctctgcctcccgggttcaagagattctcctgccttagcctcccgagtagctgggattacacgtgtgtgccaccatgcctggcttatttttttttgtatttttagtagagatggggtttcagagtgttaggcaggatggtctcgatctcctgacctcatgatctgcctgcctcggcctcccaaagtcctggaattacaggcatgaaccactgcgcccggcccttctcgctgttatttaagggaagcggtctcactgtgtggcacaggctggtctcaaactatcctcctgtttggcttcccaaagtgctaggattacaggagtgggccaccgtgcccggccctcctcgctgttatttaagggaagcggtctcactgtgtggcgcaggctggctttgagctcctgggctccggcggttccaccctggcgctgtggtgcagctggaagcattttgctgtcttttgtttgactgattctttttatttttcctttgtttccattggtttcgataccagtggtctgcttctctcttggtcttcgttgattcagttaataatttgcaaggatgtaaaataaaatagagctttatagaccaaaagatcgttgtcttaaatatatcatttatagacgagatcaggcatggtggttcacgcctgtaatttcagcacttttggagactgaggtgggtggatcacttgagcccaggagtttgagaccagcctgggaaacagcctggcatggtggcatgcgcctctagtcccagctactcaggaagttgatgcggaggatcgcttgagcctgtgagttcgaggctgcagtgggtcagtgatcgtgccactgctctccagcctgggtcataggggtctttgttggccaggctagtctcaaattcctgcactcaagcaatcctccctccccagcctcccaaagtgctaggattacagatgtgagtcactgcccagccttcagacgttttctcctgaaggtgaacaagcaaagaaggtggcttactttttcagtgtcttaacaggggttttggcagagaagctttttcagttttcatgatgggcgcgttttgaaggccagagctgatggcactggtggatggactcctgtattctggcctgagcacctgagtgctgcctgtcactgctgaggggagtcctgggagaggagcgtgggctgggagtcttgtttgagacccccagtgttgatgcatatgaggggccagagtgtagggagaccctggagctggaagtggggattttggagccatttgggtatatgtgtagagttcaaggtctgaggcctggatgagccaggagtgagggtagagggagaaactggagtcgaggcctggagcattgaaccttgaacatcgggcggtaaagagaggaggctccggtaaggggttggaaaggagtgctgcaaagtgggaaccagagtctggtgtcctggacatccaggaggtggccactctgtgagggtctgctctgtacaccaagaccgtggggaggactggccgtcctgcgtgtgcctcacggggaaaggagaagggcgaggggaggcagcggcagcacggcaaagaagcgagtgttgaaacccctcaggtgctgtccttcccgaccccggctagagggttgggaagtgtcttcttggagacgtccctgaagcgggagggccatggcgtagcttccgacctccacaggctggacccttcttgggcaggtgcctgaagcgggagggccatggcgtagcctccgacctccacaggctggaggtgcccctagggcagggtggtggacagagtcttcctctgttggggggggggggtgcccgcactgggcgcacagatgtgagccgggctgagtcccgcgccgggtgcgcggatgtgtgctgggctgagtgtggccggccacttgtttgcgttgtttgtggacatacaaataggctgttgttgaactgggttcgtggtggggacttagagactctcagagtctatggctatttttaaattttattctttgaaggtatttggcttgcatgacctttgtttggttatgttttacttgaatcatgtcaaggaagctacatgaagtgtgaaccagagtgttcactgcaaaccttctcccctgtagcttaatgtccctggctctttgtttgccagagccaacagtgaaaagggtgataggattttttatttaaagaaaaggaggctgggcgccatggctcacgcctgtaatcccagcactttgggaagccgaggtgggcggatcacgtgaggtcgcgagttcgagaccagcccgaccaacatggagaaaccccgtctctgctaaaaatacgaaattagccgggcgtggtagtgcatgcctgtaatcccagctactcaggaggctgaggcaggagaatcgcttgaacctgggaggtggaggttgcaatgagcagagatagcaccattgcactccattctgggcgacaagaacgaaactctgtttctaaaaaaaaaaaggaaaggaattatttttcttaaataagaaaactaccacaaagttattgctttgtgacccagatacatttgtatgtttgttttgaaaggaaaaatagacactgggtggtatttgagttttgttttaagtctactataagacccaaaacatattcaggcacttagtttaaaagcagtcatgtaaactaagtagtatttgagtctttttgagtctatgctttttttttttttggtcgggggagacagggcctcttgctcagactgaagtgcagtggcactatcatagctcactgcagcctcgaccttctgggctcaagcaatcctcctgcctcagcctcctgagtatctgggaccacaggcatgcaccaccacgcctggctaattttttgtagtctttgtagaggtggggtcttgctgtgttgcccaggctggtcttgacctcctggacccaagtcatcggcctgcctcagcctcccaaagtgctgggattacaagcatgagctacgatacctggccttgtctgtgctttttattttcctgtatggctggtctaagtagcgttttcttactggtgtttttaaagtcatgaagcaccttagttgtggttttgtttgtttggcgacttataataacacggtgagctgagcttggaagtgttgcatccatgttctcagctgctccagtgttgtggggacatgtggggactctgccctgccccggctggaacagcaaaaggtgctgatggtgggcttttcttttccaggtgcacattcaggttcccgagcacaaacatcaagataacgttcactgccctgtccagcgagaagagagagaagcaggaggcgtctgagtctccagtgaaggccgtacagccacacatctcgcccctgaccatcaacattccagacaccatggcccacctcatcagccctctgccctcccccacgggaaccatcaggtgcggccatggggatgggggactggagcatccttagtcccagtggcagccccaagtaacgcctttctccttccctggtgctgacttatgtggagagagagaatgtgaggtggtgtttaaaatatcattggatttctgctctgaatttcctgcattatgaaatgcagttcccaaaggttcctggtttttatttactcattcccttttttttttttttttttgagaaggagtctctgtctgttgcccaggctggagtgcagtggtgctatcttggctcactgcaacctctgcctcccaggttcaagcgattctcctgccttagcctcctgagtagctaggactacaggcgcccaccaccacgcccacctaatttttgcatttttagtagagacagggtttcaccatattggtcaggctggtcttgaactcctgacctcaagtgatccgcccacctcagcctctccaagtgttgggattacaggctgagccactgcacctggcctgtttactcattctttaaaagatgtttttaaagtggtttttttttttttttttgggagatggagttttgcactgttccccaggctggagtgcagtggtgtgatctcggctcactgcaacctctgcctcccaggttcaagtgattctcctgcctcagcctcctgagtagctggggctacagacatgtgccaccatacccggctaattttttgtatttttagtagagacgggatttcactgtgttggccaggctgatctcaaactcctgacctcgtcatccacctcccaaagtgctgggattacaggcgtgagctaccacagctggctggtttttttttgtttgtttgtttgttttgttttttgtttttaagagatggattctggctgtgttgcccaggatgaactcaaactcctggacttaagtgatcctcccgccttgaccttctgagtagctgggacaacagatgtgctccactgtgcctggcctggattctttttattggagtataaatgaaagggcagacagtggtctaaagtctgccctttcaaaattttaattttgaattttttttagagagcccacagcctgaagaaccatgagccaattaaacattttttctttattttttttttaaagaagagtagagagcccagaaataaaccctcacataatgtagtcaaatggttttttttttttttgagatggagtttcaccctttttgcccaggctggagtccaatgtgcggtcttggctcactgcatcctctgtctcccaggttcaagcgattctcaagcctcagtctcctgagtagctgggattacaggcatgcaccaccacgcccggctaattttgtatttttagtagagatggggtttctccatgttggtcagggtggtcttgaaatcctgacctcaggtgatccgcctgcctcggcctcccaaagtgctgggattacaggcgtgagccaccacgcctggcctcatcaaatggtttttgacgagggtgcccacatgcccacaccattcattcagacttcccaacaagtggtaccaggtaaacggtatgtccacatggaaaataatgaatttgggcccttatcttataccgtgtgcaaaaattaactgaaaatggatcaaagacctaaatgtaaggcctgaaactataaaattcttagaagaaaacataggcaaaacctatgacattggatttggtattgatttcttggatttgataccaaaggcacaggcaacaaaagaaaaagacaaattgaacttcttgaaaatttaaaaaatttctgcatcaaaagacaacatcagtagtgaaaaggtgttgtacagaatgggagtaagtatttgcaaatcatacatctgacaagggattaatatccagattatagagagaactcctaaaactcaacaacaaagaaacaaaagacccagttcaaaaacgtgaaagacattgtttcaaagaagatatagaaatggccaataaggacatgaaaagatattcagcatcagtagttattagggaaatgccaatcaaaacacaatgagatcccacctcacacccattggattggctgctattaaaaacaaaaaacccagaaaatagtgttagtgaggatgtggagaaattggaactgttgtgtgctgttgcaaggaatgccaaaccgtgcagctgctgtggaaacagactagcagttcctcacaaaactaaaaatagaattaccatgtgatccagcaaccccacttctggatatagacccaaactgaaggcagggtcttgaagaaatatttgtatgcctgttttcatagcagccttatgcacaatttccagagaatagaagatacaatggaatattattcagccttaaaaaggaaggaaatcctgacatatgctgaaacataaattaaccctgaggacgttatgctcagtgaaataagccagtcattgagattcctagagtatcacatttgcagagacagaaggcagaatggagaggtggccaggggctgggggcggggagggggagccggtgtttcttggggacagagcttcagtttgggaaatgagaacattctggagcggggtggtgtgatggctgcacctctgtgtgaatgcgcttcatgctgctgaagtgtgcagtttaaaatggttaaaatggtaaattttatgttgtgtgtattttaccacaaaaaaaaaaataggccccctggaaaaacatccgttgtgcatgtgtttgtgaaatggaggtgtggccagtggactctggccaccatcctgtgcctggtgctgtctgagagtcgccccggctggcatcagggccttctcgttgctgccctctctcccattgctcctttgctgagaggctgccctctctcttggctgaatttggctgaacataactgagtgggccaaatagtaagtgtgcaagtgggtaggcacaagtcagtcctgccgcccagtgcttattaagcactgcatgaaaagggcacagaattccctggagtagaatgtgcccaagtttacgtaagtcacatacagctcaccgccaagcagcagccttgaagaccccacttcaagtgtgactgacagcagcggtgggtgcaggggaagggtgggtcacagctgccaccctgaggttgggtcggctcccaactccgcctctcctcccacctgctgctttcttttcatcctgcgtttccttgcttgcccctccccacacctgcacagacctttgtcagggggaacccaggtccccggggcctccaggtggagcgagcctgagcaacctgactttccaaacctgccgtccacccagcaggtcactcgccttcctcgggccacactggctgcatcctccacttgttaaaagttggctctttaaactcataaattgtagatgctttttctccagtgctttaaggatggttgctggcattgagtaaatacttgttgaatgggtgagtgagtataccagtggtgcatattcatggcggagagtctaagaagcactgcagagggtacaaggccactcgtgtgttgccctttccctcctcccccccacctctccatctccctggccctccttttggagttgtttctcagaggtcatgcctttaggcttcttggtgattttctctagaccttctctatgcatttgcaatgtttttccccaaacacacctctctgacttataagataatcttaccttgatattgttccatttcaatggctcgttctttttattgaagtgcagaaaatgaggcatggagagaatctgcagctccttgacttaccagaaatgcacgtgccctttaatcggcacagagatcaagaatcagaacactccctgagcccccgtccagcccggtgggaaaaagtggctgtttgaaaacgggcctgattctgtgtcccgggcgcccccagctgacccgctgctgcgtcccgggcgcccccagctgactgctgttgtgccttcagcaggtgtccatgtccacggcttcatcttcagtggaaccgcttgctccacttcagctccaggggccttggctggcagacccctcccctcccccaccaccccgactttccctgtcttttctgtgccccctgtcacagctcctcagtgaggacctctgtgcctatcttgtgtcactttgtgtctttaataagttctggaaccattcggagcctcagtttcctcactggtgaaatgagtgggccactgcctcccctgagagcttgtgtcacatttcatgagctgacgtttatagaagcaaataccctatttccacattgcttcttgggacgatcttaaatttcacagatcatttataagaatctgtgtttccataggaaatgctgatattctcttccttttttttttttttttttttttaacatttctgtatttgttatccctgtaattaaagccagttgctgaagcacagtaggatgcgtgcactgtgatagactaataggaacaactttttctcttccacagcgctgcaaactcctgcccctccagcccccggggagcggggtcttcagggtacaaggtgggccgagtgatgccatctgacctcaatttaatggctgacaactcacagcctgaaaatgaaaaggaagcttcaggtggagacagcccgaaggtaaaggctttgtagccttgaagcagcccctgggggacagtgtgtagccacagggccctcaatgtcacctgcctgtcactcacctgcctgtccagtgacagccctgccagggcatcggtggggatgtgggcttgattctggtgttgctgctgtgttcttggtattggggctttttgcaagtgtactcgtttagtcattcaacgcacatcttagggtctccctaatagctgtaggcccaggtgctgagggctgggcagacagcggaagatggaggagtaccttggtctttgtggagctcatgtgtgtttgtgccggagtttatccccttgtcccaaactctgaaggttatgcaaatgcacaccctgccactcatgtttgtatagggcacgtttgtcacttgtttggacagcagttgttgagagtcacactatgacctggcacgtttgtattctttgacccagtaattttccttttaggactttgaccaaaggaaatggatgaaagtttgtataaaacaatggaatgcggctgggtgtggtggctcatgcctgtaatcccagcactttgggaggccaaggcggggggatcacttgaggtcaggagttggagaccagcctggtcaacatggttaaaccccgcttctaccaaaaaaaaatacaaaaagccaggcgtggtggcacgcagctgtaatctcagctgctctggaggctgaggcgggagaatcacttgaaccccgggaggcggaggttgcagtgagctgagatcacgccactgaactccagcctgggtgagagagtgagctcctgtttcaaaaaaataaaataaaaaataaaaagaacgcaacctcagtgtccctaggggaatggtgattaggatattgtgcttccacttagggaatagcatgcagagtatttgctgatatggaaatattccagatgtaatgctgagtggaagaaagagagtaagaaccatgcatggtattacttgacatattgaggaagtgtgatctatcccagcagaacgcagcacagccatgagaatgaataagccacagctgtgcatcccccacctgcggccgactacggcgtctaacacagggtgctaggcaaggagggcgcgtcgcgtgtggtgctgtttctgtcaggcttacaattggacagatctaagttgtattgtttaaggatgcagccaagtggtaaaacgtagtaaatcccagcaaaactgtggtcactctaagaagtcagtagtaatggtggcctcttggagaagtagaggtagtgggctgagagggcccatacgagcatgttggggatgctggtggtgccctgtctcttgacctagtatactgatgttcactttgcaaaaatttgttcagctgacataaatgtatcatgagcttttctgtctgttttatatgtttttcaatttaaaaagtttttagaaacatagaaaaaaatcacagggaagtcaacagcacaggcacagtgacgaaggctttgttagctgtttaaaggaagagacgtagcgggcagtgtggcatgcacctgtagtcacagctgctcgggaggctgaggcagaatcacttgagttcaaagctgtggtgagctacgatcaatccttgaatagccactgtactctagcctgggcaacatagcaagaccctgtctaaaaagaaagaattaggtatgtggagggtcttcttgtgattacatttttctgtttaaaaaaaaaagcgataggctgggcgcagtggctcacgcctgtaatccccagcactttgggaggccaaggtgggcggatcacgaggtcaggagatcgagaccatcctggctaacacggtgaaatcccgtctgtactaaaaatacaaaaaattagctgggcgtgttggcaggcgcctgtagtcccagctactcgggaggctgaggcaggagaatggcgtgaacccgggaggtggagcttgcagtgagccgaaatcgcgccactgcactccagcctgagtgacagagcgagactctgtctcaaaaaaaaaagagagacaaatttgacttcgggaggccaaggtgggcatatcacttgagctcaggagtttgagatcagattggacaaaaaagcaagatcctgtctctacaaaaataccaaaaattagccaggcatagtggcatgagcttggagtcccagctgctggggcggctgaggtgggaggatcacctgagccctgggagttcaggcttcagtgagccgtgatcacaccactgcactctggcctgggcgacagagtgagaccgtgtccccagaaaagaaaagacaaacgtccctctgcccactctgagctgtcagcgctgaacgcggcctgtgctatggaagcccatgtgggcgcctctgatatccttgcctcctgtctgtcagcctgcctgtttcccattccatttgtgtttatccttgaacagtatctataattgttcattgtaaaactccatgtatatagtatcatcttgaatgtattttttcatccgacattatctgttgctcttcatccatgttgacaagcgtgttgcccagaagttcacaaccaggagtgattccctttcccagtgggctcgtgcctgtaagtgtgggtttcaagttgtcactatgacagggagccaccagtggccttgaaagagccaggaccagggatgccagcctgtcagcggggcactcagcagccaggatgtctccaaccccaaggtgaagcctccatggggctcttcgtgggccagggggctcctcctcatgggcggcagggtctccttgtggatgggtatttggtgagtcccaggggctctgggcagccctggccacccctggtgcttatgcctggggaggggtgctgctggctgtgagccctcagccagccttacccacccctcgcctgtacccctggggtagctgacaggatctggtcgtggttgaggtgctttgccttggactccactgaggtcaagcagcctttatgtcttcatttttgacatttggattttttccttatgtaatttttaatattctttatagttttccatttgtttcctccatgttttcgaattgtattactttcatagtaagaaaaatgaggtatcaggctgggcgcagtggctcacacccgtaatcccagcacgttgggaggccgaggcaggcggatcacctgaggtcaggagtttgagaccggcctggccaacatggtgaaaccccgtctctactaaaaccacaaaaattagccgggcgcggtggcaggcgcctgtgatcccagctactcgggaggctgaggcaggagaaccgcttgaactcagagggcggagactgcagtgagccaagatcgcgtcactgtactccagcctgggcgacacagcgagactctgtctcaaaaaaaagacaaatgaggtatcagaggaacacttaaaagcactgagaatctttaaatctagtaaatttaatacaaaatatggtaacttcaatattcgttttgtgtttgttttttaaatacaggatgattcaaagccgccttactcctacgcgcagctgatagttcaggcgattacgatggctcccgacaaacagctcaccctgaacgggatttatacacacatcactaaaaattatccctactacaggactgcggacaagggctggcaggtaaatgccttcagtttgttgttaaatagaggctgatggataccgagaagaaagtggagcggctgctgtctggaacacaggcacaggataggaaggtagaagggggggttggagcctcccgtgctgagaggaagaggagttgggggccggtgctgccatgctctgcctcaccttctttgtgtggagcagaaggaagcgtggttctggaggagcgtctaggcctgcatgctttactgttgtggaaattcatgtgtctgcataggatttgtgaagtgtggattgtttgagatatttccctttgaccaatgcagttcatatttgaaatgtaggagaaatttaaaacccagcctatccttccctttggcattctcctgtcttcctcatctaatcctgctaatggacagaagttttgaagtttgcagagacagttttcaaaccgcattttaccaaggaacacttagaagacatcttaaccagttggccggggtaaaaaacagatgaacgtggtgtgccctgtctcagccggggagcccacctggtcgtggaaccccggggctacccccaagagacactttgaaatctgcaaaatattccctttggtcagctcacacaccaataatttttttttttttttttgagtcagagtctcgctctgttatgccaataattttaaccctttagattatgtaggttttttctctgtgtatctgtgttgtgttggctgtttactggatgtatatgagaatcttgctatttgaaataatttggcagtgggtaggtttgaaatatagaatattaaaaacatagagaagaaatgtatgtatgcttatagttttttaattcattaagtaaccaggaacatctatagaatttctttgaggctttaatgagtaaatgatcctttaaaaaaacatctaaactacatggcttagtggtaaggatggtgcaggggcaactgttttctatttattgaaggggaaaaaccttttttgttttaaccacagatgtataaacatgttatgttaaaaaatagcctaccggccgggcacagtaactcatgcctataattctagcactttgagagccgaggcaggtggatcgcgtgactctaggatttcgagagcagcctgggcaacatggcgagaccctgtctctacaaaaaataaaaaaaaattagctgagtgtggtggcttacgcttgtagtcccagctactccagaggctgaggtgggaggatcacctgagcccaggaagcagaggttacagatatctgtgatcacaccactgcactccagcctgggtgacagagcaagaccctgtctcaaaaaggaaaaaaaaagcctaccagccacgtcttccatatttcctttgtggaggggcttgggggtctttaatcatggaaggtacagaatgagacccagcctcccctctggcccaccttgtgcccaccccccatacctggagtgtctataccctgtcctgcctgccttcctgtctacagcaagggggtatctcttaattgaccattaggaaaatgctggatttggagagtagttccatattcagttacatgtcagggtctcttaacatattgcatgctaaattctggccgtatttactctataaaactgaggctgtgcttcaaactatatacatacacacacacactctctctctctctctctctctctctcacacacacacacacacacacacacacacacacacacaaccagataataacttctacccatgttccagtgaccatggctttatggctttgtcaaggagagaaactccacatggggtccagcttgctctgtgggagtgtgtgagggtccctcagagtttacagcttattctgatggtttgagataccagttacctggggctttgtcagtgtgtttctaagaagctttattagactctaatgtgtttctcttaagtggtatttctgtgtgttttttctaacatccatttatttgagaactacctatgaacaggacaaggctttcttgctaaagagggtggctggataaaggcctggcctcagttttgggggggcccaagtcaggacaggtcttttggggagcagagcccttggagcaaggctctcctggaccacagtcgtgaagtggcgaggaccccacgggacccctcatgcatgccctgctttctgtcgtctattgcaggtgcctgcacagctcacgtcggcagggaatgacagactagcacacgtcaggcacccttctctgctgaactgctattaaacttgtttctgttgaaacattttctctcctgtctagatggaggtctgtaagtctacagctgcatctctttccccagtaaggccactcctgtgtcatttcatgcctcgtggctccagctaattaagcgggagagggattagtttctccagattcctcctagttcatggacattactctctctcttttttttttttttttgagatagagttttgctcttgttgcccaggctggagtgcaatggcgcgatctcggctcactgcaacctccgcctcccaggttcaagcgattctcctgcctcagcctcatgagtagctgggactacaggcttgagccaccacacccggctaattttgtatttttagcagagacggggttcctccatgttggtcaggctggtgttgaactcccgacctcgggtgatctgcctgcctcggtctcccgaagtgctgggattacaggcgtgagccaccgcgcctggccaatgtactttgaatttctttctgtcctcagctgtacccttggctgtcagaatactgaccctcacgggctcttcctgtgccatgagattctctgagccgcccttcccagtgcctcagaccttattctgacttcctccctcctggcttacaacaaaagccaggtgttttgtattgtctacctatggtatagctttttggtcaatccacagaggacatctgagggtgaaatgagatggtctgaggaatcctatttgaaaagatgccatatgtctttcttttgtttgcatttacgtcctatgatttgattttttcatggtacaaaagtatttaataagtgacacttcagtacagaaaacacagagcttgtagcttgtcctttaaaaccaggacggccaagtgaaaagtcagtacagagtcttatttttactattaaacaaatcaaagggacacactgggcattgaactactatgctttttcttctttctagagatgacatacgtgttttctgataagtaatgtaccacacattgcactaaagcaaagcagcaaacagccagtaaagctgtgccctgcctgctgctcctgccgggctggaccagtggaacaccatctcggtaggagaggaagaaaatgcagagtccctaacccagagagcctaacaaactggtttataccgaagtgatcttcagcaaacacgcaaacacactaacatgctgtaagaatgttttagtctatttctagcacacagcataaattcgtaggtgcccagtcaaataggaaggaacgccattgtagaaagcatttttgccttcacagcactaacacctaaaaagcacacggcatatagtactttgatctttaagtggataagcatggaagtcccaagatcatatccactagattagcctgagtattcatctataaaaatatatatttttaaaataatgcttaaaagagacttctagaaacagtgggactacatcaggagcagaagacagcgacacaaggactgcaaatgttaagactaggagtggcttttcacgtggaacttttatgtagaggacgtctctttctgttgattgctacagccgagacaagctgtgatcacaggagattctgaaatctcaagctgggcttgagtaacaccctagatagacatcaggaaccccattgaggctgaagtactgaaactgacccatgtgaagaagagataaagagatgcagatgcgcaaagattcacgcagagcctgctgggacagagggtggcggcgggttcatccacacgtccacaccagcgtgtgtgcttgggtggcggcggcgggttcatccacaccagcgtgtgtgctcgggtggcggcggcgggttcgtccacacgtccacaccagcgtgtgtgctcgggtggcggcggcgggttcgtccacaccagcgtgtgctcgggtggcggcggcgggttcgtccacaccagcgtgtgtgctcgggtggcggcggcgggttcgtccacaccagcgtgtgtgctcgggtggcggcggcgggttcgtccacaccagcgtgtgtgctcgggtggcggcggcgggttcgtccacaccagcgtgtgtgctcgggtggcggcggcgggttcgtccacaccagcgtgtgtgctcgggtggcggcggcgggttcgtccacaccagcgtgtgtgctcggggaaggaccccccaagtggagtgctggacatgggctcgctccagaggcgtctgactcagaagctcctgagagaagtgtctccttgaggaggggaggaatactacggttaatgaatacaagaaggtgtttcaggagaaataggtctaggagggttaagtcattttggttttgacctgtcaatacttaacataaatgaagaattacaaaacagagtcagtctttttccaagatgtattctgtcatcatgagctgagcctgttgggctggtgacatccagaatgttccaattcattggctggagggaggacccagtgccgcagattgttctgggaagctggcacagaagatgattgacacaacgaagtcaccactaagccactgcttaagtctagtcctcggccttctttttctgctctgtagtccaaaaccgtgaacgtagcagcatgtcgaatatgtcaccagctgcttcatttttatggtgctgtaatgtggtggtgaaagctgccatgttgaatccagaaatccgctccagcagctgttcttcaatatatttttctaccaaaaaaatgtatgcaggctgggtgcggtggctcacgcctgtaatcccagcactttgggaggctgtggccggcagatcacctgtggttggagggttcgagaccagatgaccaacacggagaaactacatctctactaaaaatacaatattattagcggggtgtggtggtgcgtgcctgtaatcccagctactcaggaggctgaagcaggagaattgtttgaacccacatggcggagactgcggtgagctgataccgcgtcattgcactccagcctgggcaacaagagcaaaactccgtctcaaaaaaagaaaaagaaaaaaagaaatgtattcattaaaaataggtgtgtaggtgagtttattctcttccgtgtcttcaaactccaggtagtacttgtccatgtaatttctctgtaataactggaactcgttatccatgataacgttctctaaatatccaaccacaacagcaaattcatcagaggtggaggagaaagacagcacaaagctctcttcttctaaggtgtccatcactgcagccccgagcaggctcctaccccgcctgtggcccaacctgcatgcagggcgtggcgggcggccgggttaaggtctcgcagccaaagctgcggcgtgctcactgcccagtcagggcagcacctgcgtgccaggcccagccctgggttagggccccgccgggccctctgtgcataccgccgacactgcgggccaaggtctcggtgactccaaaatgatttttatggttttatgattttacttcacccagaattgagataattgttgtgactatgagaagtttgaaaggacgggcctctcagcctccaaagggactagagctggttccttttatttatttttgttttatttatttttttggggacagagtcttactctgttgcccaggctggagtgcagtggcgcgatctcagctcactgcaacctttgcctcctgggttcaagtggttctccattctcagcctcctgaggagctgggactacaggtgcatgccaccatgcccggctaatttttgtgtttttactagggatgggattttgccatgttggccaggctggtctcgaactcctgacctcaagtgatccacccgcctcggcctcccaaagtgctgggattacaggcgtgagccaccgcacccgtcacttgatctcttttaaagggaggactgtactctggactcaccctcacccttgcacttttggaagcgttcctggacattagacccatcctctgaaaggaacttgtcctgttccttctcctcagtttctgtacacgtccttactgtgcagagtgcacacgggagcgcactcagggctgggtgaggaaacagacaaaccgtccttgagaaacgtgaggtctgcttaggaaggctgcaggaaggcacagaggagagccccggaagggagggagctggtgctcagggagggctgattttcagcagacgctcaatttggaaagcctttgggggaaaggtaattgctcagaattgcaaatccttttcttcatgtttagcgttaaagaataacagcccacgttttctctgaaagctttaaaatttctgaatcattagagtccagtcaatgtggttttaatacatgtagcaacagaatgaaggaacatccatcctgggtttgatcaaattacaacagccttaaattaccttagaaacatagttactttattctatttgtgtctacattaaatgtctcattaattcctcatattttctggagtcttgttggctggcaaatcacaagtaatctttcttcatttgcccttggagttgttgtcagggagatggattggagaataaaataggttagaatctattctgatgctgcgaactgggttcttttacgttttcaggacagaaaatagcagctccccaattccacagacttactttgcgtctcgtaagtgatggtggtggtgacgcaggggcagggcttctggcccgtgtcacgttcttctgctcacatggctggagtatggccccaaagtcaccttttctgcttccacattcccactgtgctaaccttctttcctcctaagagcatgcaaattaaatgactccacatcagtcagtacagccacagccttcacttcggggcttgttgactgttgtctgttcttcagactcggatgctgcgtggggtagctctttctgagtccccgcttaggaggactggtcctggtagaacagcgagaggggaagtcgtccttctcaggcagtggctgggattgccatttgcactgcttgagggttttatattaccatcgtgtgggtttgcttttcttcagtcctagtctcagaatctaccttctacttcacacttaaaattctgagagcagttggcaaagctttgccttctctgtctttgtcggggcaccaataacagtcatgtttgattttctggaggaattgatagaaagattgggcgtcagctaaagccaaataaaacattatagcagtatctgtggttattagaatatttgaaatctcatctgatgcccttacctataaacagtttcacaaatcccacacatggcctagcccacctcttcatgtcgcccatgaagtagctccatccacagggcccagatccctcccacacatggcctagccctcctctccatgtcacccatgaagtagctccatccacagggcccagatccctcccacacatggcctagccctcctctccatgtcacccatgaagtagctccatccacagggcccagatccctcccacacatggcctagccctcctctccatgtcacccatgaagtagctccatccacgggcccagatccctcccacacatggcctagccctcctctccatgtcacccatgaagtagctccatccacagggcccagatccctcccacacatggcctagccctcctctccatgtcacccatgaagtagctccatccacaggtcccagatccctcccacacatggcctagcccacctctccatgtcgcccatgaagtagctccatccacagggcccagatccctcccacacatggcccagccctcctctccatgtcgcccatgaagtagctccatccacagggcccagatccctcccacacatggcctagcccacctctccatgtcgcccatgaagtagctccatccacagggcccagatccctcccacacatggcctagccctcctctccatgtcacccgtgaagtagctccatccacagggcccagatccctcccacacatggcctagccctcctctccatgtcgccggtgaagtagctccatccacagggcccagatccctcccacacatggcccagcccacctctccatgtcaccatgaagtagctcccatccacagggcccagatccttcccacacatggcccagccctcctctccatgtcacccatgaagtagctccatccacagggcccagatccctcccacacatggcccagcccacctctccatgtcacccatgaagtagctccatccacagggcccagatccctcccacacatggcccagcccacctctccatgtcacccatgaagtagctccatccacagggcccagatccctcccacacatggcccagccctcctctccatgtcacccgtgaagtagctccatccacagggcccagatccctcccacacatagcccacccctcctctccatgtcacccgtgaagtagctccatccacagggcccagatccctcccacacatggcctagccctcctctccatgtcacccatgaagtagctccatccacagggcccagatccctcccacacatggcccagccctcctctccatgtcacccgtgaagtagctccatccacagggcccagatccctcccacacatagcccacccctcctctccatgtcacccgtgaagtagctccatccacagggcccagatccctcccacacatggcctagccctcctctccatgtcacccatgaagtagctccatccacagggcccagatccctcccacacatggcctagccctcctctccatgtcacccgtgaagtagctccatccacagggcccagaggcattaggatggcacttggacaacccctgagatgggttgtaaagtgttattttatattttgtatgttggatttcttagtcacctttgacgatttgaaattcaggctgaggcttgcaattctaataaggttaattggggaatttagaaatgatttttggatagctccagattttgttttgagtgatcaccattttaacactttaatagcttaattttaaatctacacattaatgtaaattcacgaaatgtttctatgaacccatgacgttcgtccggctttggcctgagtcaggtcccagcgggggctttcttcagggtgtctgtcaactcttagctgggcttttttctgagatggagtcttgcttctattgcccaggctggagtgcagtggtgcgatctgggctcactgcaacctcctcctctcggcttcaagcaattcttcagcttcagcatccttagtagctgggactacaggtgtgggccactgtgcccggatgatttttgtgtgggtttttttttttttttgagatggagtcttactctgtcgcccaggctggagtgcagtggcgcaatctcggctcactgcaagctctgcctcccgggttcacaccattctcccgcctcagcctcccgagcaactgggactacaggtgcccgccactacgccccgctaatttttcgtatttttagtagagacagggtttcaccgtgtttgccaggatggtctcgatctcctgacctcgtgatccgcccgcctcggcctcccaaagtgctgggattacaggcgtgagccaccatgcctggccaatttttgtatgttcagtagagacggggtttcaccatgttggccaggctggcctcaaactcctgacctcaactgagccgctgcgcccgtctggctttttgtaatagaaagaatgatgcactgatgaggagctgggagggaaatttttcctgtgtacgttacgaaattatttcagagttcaaataaaaaaacaggtactttgccaagtcctctcttcctggaagatggtgtccatcctgattttcagcctcctgctcatttttcttttttgctggtttaccaaatactttatactggattaatttacttttaatggcatgacagattctgtaagctaattctgtgcgaaaaagtattttaacagaatggctcacatcagctctgtttgtctccaagcagggagaggttggcagctaagtcattgcctccacctggaatgctcagtgctgacagttgcagtcctgggtttcccaccttgaaaggagatggagtcagaaatggcctctgtctgcgctgtgtggattgctcatccctcctgttgccagctctccaccctgcctcccggggcccgttctgccacagagtgaggtgtcctttcctctttggaagcccatagcagccttgggctgaagggctcaaaccccaggctgctacttcccttgagaattgctcacccaggcgggagggctgctccttccacacagcacagcctgtaaacgtcactctctgtcatcgtttataagcatgatgactgggttttcacgcttccccataggatgggccttccttaaatcttgttatgttgtcagcacattacttgtgtgacgcaaaagaaaaaaaattcactcttgcagtctgccaggcccaacatgtaggtttctgctttttagggcactaaaacgaggacacatttttatttctcagcaaataaatatatgaattctacgtatttttttatgtttcatagaattcaattcgccacaatctctctctgaatcgttatttcatcaaagtgccgcgttcccaggaagaaccaggcaaaggctcgttctggaggatagacccagcctctgaaagcaaattaatagaacaggcttttaggaaacgacggcctaggggcgtgccctgctttagaacccctctgggaccgctctcttctaggtaaggaaaaagaagaacaaaaggcctcacttcgtgcttactaaacttaccttcagtgtattgggaaaatttccttttgaaaatgaaggaactactaaatgcattatgattaaatgttgggatggggatttgagcaaaagtgttgggtgctgcccaggtgtttctggttctagtggctgaaacatttgagacgatttgcaaagtttaaactgcactcgacgcagtgattgttgcttcatggggctcatcgcatgttgttcataccagtgccacgtcgacgtttttcctttcccttggcacaggaaaagttctttaaaactactttttaggccgggcgctgtggctcacgcctgtaatcccagcattttgggaggccgaggcgggcggatcacctgaggtcaggaggtcgagatcagcctggccaatatggtcaaaccccgtctctactaaaaatacaaaaaaattagccgggcgcggtggcgcgcgcctgtaatcccagctactcgggagcctgaggcaggagaatcgcttgaacccggaaaggcagagattgcagtgagccgagattgcgccacttcgttctagcctgggcaaaacagcgaaactccgtctcaaaacaaaaatacactactttttagctgcttaagttcgagttgacttatacagtgttaatttgcctgagtttaaatacttatttttagcttcactaatactgtttttaacaaaaaaaaaaatgagcgtaacgtaagtcttaaatgcccacggacctgctcgctgccggctccaccgtcagtgcacgggagctgcttagagagggcagctggctccgccccacagccgtgccgcgtatgtgggtgagggcccgtgacggccctgtcccacacaggctgagtctgtctacccgagtgtcccgctcagttcacaggcgtaggcgtgcagagacgtagaacttacacaacagtacttggttgtcaggagacaaatgacaccccctttgcaaagtgcacttattaaaacagcaagtgctttctgagtgcgtcagctgtaaccatgcaatgtcttcttctcggtgacacaggagtgccccagcctctcccaatcacgcgggagtgctgtctgctcactctagtggcgcccagacccctgagagcctgtcgagggaaggttcgccggcccccctggagcctgagcctggcgctgcacagcccaaactcgctgtcatccaggaagcccggtttgcccagagcgccccaggtgagacagcgggagaggaagcgagggccccaacagcgtgagccagacgcggacgcctgggctccacagagaagaaacagccggactggaggcctgcctgtccctctgtaccttatactagtacctgattttataggccttggaaaactaatagcactgggagtgttttttaaaaatcaatgaaggttctttaaacgacactgagtagatgcctgaaataacttagaattaacctgtttcttagtttgtcattcaaaaatccatgaaacagcccccgcacccccaccccccgcaaaaaaatcaaaacaaaacaaaaacccatgaagtagacaaactagacactggaagcaaaaacatgtcctttttttttttttttttttttttttgagacagagtctcactttgtcaccaggctggaatcttggctcgttgcaacctctgcctcccaggttcaaagaattctcctgcctcagcttcccgagtagctgggactacaggcacacaccaccacacccagctgctaatttttgtatttttagtagagacagggtttcaccatgttggccaggatggtctcaatctcttgacctcgtgacctcatgatccacctgccttggcctcccaaagtgctgggcgtacaggcgtgagccaccacgcccagcctaacatgtccattttaaggaataggtaaaacagtttgcagtttacttagtcataatgtggaataaaaatgtgtgccctggggaattaaacaaacaaacatagtgtggaaatgtgtccaaactgtctgttacagttgacagaaagtgaattgggtcatttgggattcctggccctgccgggccagagaacagccctcccctgcccactggcggtggcccctgacagccatgtctccctctctttgctctaagcccccaaaccatggcagaggcccctgacagccgtgtctctctctctgctctaagcccccaaaccacaaagggcagaggctgggtgccagaggctctgtgacagccccactctgtttttgaactttctgcttcccttccactcgttacaggaggaagatgttgatcctaggtgagtgtggccctcgtctttctggcctacaggggcagtttcttctttttttttttttgttcgtttgtcttgagacaaggtcttgctctgtcactcatgctggagtacagtgacgtgttcttggctcactgcagtctccaccttccaggctcaagcaatccgccctcctcagtctcctaaatagctggggctgtaggcgcacagtaacatgcccggttaatatttgtcgtagagacagggtctccctatgcccaggctgatctcaaactcctcccacctcagcctcccaaagtgctgggattacaggcgtgagccactgcgcccggcccagtttcctcttttattgagtattgacattttcttttttataaagaactgtgggaagaggggttaccagatatctaaatagagccaaaattgcatttttagcagttagagataggaattaaataccccttttaaaatactacacctccctcattattagtaactttactattgtgaggtgaaatagggccatatcctatattttaaattaaagtttgtatgttgcttgtcagtgctgagtgtgagaacctttgtttgtagaagtcagtatctgtaagtgtcagtcctgctgtgtctttcaccagggtcacctctgtccagtcagccagtcttaatcaccgtccagcggcagctaccacaggccatcaagcctgtcacctacactgtggccaccccagtgaccacctcgacctcccagccacccgtcgtgcagacggttcacgtcgtccaccagatcccagcggtgtcggtcaccagtgtggccggactggccccagcgaacacgtacactgtctctggacaagctgtggtcaccccggcagccgtgctggcccctcctaaggcagaggcccaggagaatggagaccacagggaagtcaaaggtaggcggaggggaaaggaggagaggggagaccacagggaggtgaaaggtgggccggggggggaaaggaggagaggggagaccacagggaggtcaaaggtgggccgggggggaaaggaggagaggggagaccacagggaggtcaaaggtaggcggaggggaaaggaggagaggggagaccacagggaggtgaaaggtgggcgggggggaaaggaggagaggggagaccacagggaggtcaaaggtgggccggggggggaaaggaggagaggggagaccacagggaggtcaaaggtgggccgggggggaaaggaggagaggggagaccacagggaggtcaaaggtaggcggaggggaaaggaggagaggctgccccatcagcctcacactctgggaagtccataagatttgctcatccttggccaggtacagtggctcacacctgtaatcccagcactatggggggctgagacggtcggatcacctgaggttaggagttggagaccagcctgaccaacacggagaaaccctgtctctactaaaaatacaaaatcagctgggcatggtggcgggtgcctgtaatcccagctactcgggaggctgaggcgggagaatcacttgaacccggaaggtggaggttgcagtgagctgagattgcgccattggactccagcttgggtaacgagcgaaactccatctcaaaaaacaaaaaaaagatttgctcatctttttctaatttgctgtttgttttagagacattttctagcaggtgtgatagctatctggttattatgttttaaactggcaagatttttatttgctttccagtaatattaatgtcgtttcttttcctttaatttcagtgaaagtagagcctattcccgccattggccacgccacgctcggcactgccagccggatcattcagacggcacagaccaccccggtccagacggtgaccatagtacaacaggcacctctaggtcaacaccagctaccaataaaaactgtaacacaaaacggcactcacgtggcatcagtccccactgcggtccacggccaggtgaacaatggtaagacatgctggtcggtggctccccgtggctgtgggtactgggagcagagccccttctcactcgtggtttcggttctgactgtaacaattttagcttttgtctgaggcaatgtttgcatttcgaagctgcaggaaatctagtcatgctggggaagtggtcgtggagtcggccgtcatgggattcccgtgggaggacctgcctgaaaagagatgagagtttctaatacattgagagggaaaaatactctcgcctcttgtagatttcctgggtgtggcctggaagcggcctgaaacggcgggagccgccgcgtgtcttttcccttggcctcgcgcgccctgtggcctgtggcggtgctatgctgctgagggtgggagagaggctgcttttctgtgcgctttgctctcagagtccgtccgaggccggtgcacagaaaaccgcacggatgttctgacattgacaagtggagacaccagaacctccgcgccgacaccgggttatctaccttcgccctgccctgtggagtgtggaaagggtgggagtccctgctggctgccgagtcaactctggcattggggcctggctcaggtgtgggctcccgctgctctgggttgggtacatgtgggctgttgccggctgtgtggctgatcctggcgcttgcgggatctcaagcaggcaaatccgaagctaccgactaaaactgtctctgtgcccacgacacgctttctttgaaagagggtacaggtcagaaggctttatcacgacgtttgaatccttaccgaacgctacgaacagagaccttgaaacctgcaggtacctcctactctgactcagcaccaccctgcctctccccaaatttatggaagaacaaggtctggaaccttttctagggaagactgactacctggggttttttttgtttttaagtaatagcaacacttgctgcctgtagatagatcgcagagtttgcagtcatcagttacctgtttgaatgccttcgtccccaagccctgtgtctcctccttctcttctctctgggtaactgtggctgtggatgctctaaggtgataaacctggtggcactgcaggtagctgggaggagatggaagccgggagggctggcgattggagggcaggcggttggagggctggctattggagggcaggcggttggagggctggcggttggagggctggcggttggagggcaggcggttggagggcaggcggttggctttctggtcttagtcactcccagtctgaagacaaggcagaggcctagtgattcccagattcgatatgtgtcagaatcacccagaaggcttggctgttagaggccagagtgctgcgttccccagagttcccgactaggcctgtctggtgtggggcccaagaatgcatttctgaaacagtccaggtctgccaagagcctccggtgcaggtcagaggctttctgggtccacctctcttagaagcagtttgaaaaaccgtatccctgcctggtatagtgcctcacgcctgtaatcccagcactttgggaggtcgaggtgggtggatcacgaggtcaggagttcaagaccagcctggccaacatggtgaaacaccatttctactaaaaaaaaaaaaaaaaaaacaaattagccgggtctggtggcgggtgcctgtagttgtagcttctcgggaggctgaggcaggagaatcgcttgaacccgagtgtggaggttccagtgagatgagatcatgccactgcactccagcccgggcgaccgtgcgagactctgtctcaacaaaaaaagaaaaacggtatcctttttatgtatttaagttatctggaatttttcattataaatttaagcaagtgttttaatttttcactattgaaaatattgatgttttaaaataaagcttttacgggattattttcagtgtactactggactccaaatacagacatcatgagatgtccacttgcccacgtgtggacacacaggcaggagcggcccagatcctcccttgtctgtggcctggtctttccatctcacattccctaacaggttttgtacgagtcacatactttaggcttaaatgtcatttattagtcatatcttttctctgcagcaataaaatatagatataaatattaaagtttgtctatgagtaacaaaattgataaaacccaaaaatataacaaattcttataaaaccaaaaattaaaatgttactgaagatgcctttcttagtgtatttagctttaaaggaaaccacctgattcgttctgtattcactgatggttgcacagtcctagtgtcaacactgagggcctgtttccactcaggaaggagaggacagtgtcagcactgagggcctgtttccactcaggaaggagaggacagtgtcagcactgagggcctgtttccactcaggaaggagaggacagtgtcagcactgagggcctgtttccagatgaacgtgaaagtctgtcagtgatcttggctgggtgtggtggctcacgcctgtaatcccagcactttgggaggtggaggtgggcggatcacttgagatcaggagttggagaccagcctggccaacatggtgaaactccgtctctactaaaactacaaagattagccgggtgtggtggcacattcctgtaatccctgctactctggacgctgaggcaggagaatcgcttgaacctgggagatggaggttgcagtgagccgagttcagaccactgcactccagcctgggcaacacagcgagactccatctcaaaaaaaaaaaaaagtcttgtcagcaccagtatttcctattattgctttcatgctccatcccatagttttcatccccaaagccagtgcccagttgagcagatgagagaggctgttcagagagaggaggtggcagatgggctttaagaaaagacttcaggaccaagaggagattctggaaatgattttccttaaaacagtgtcggctacagcctggatgctgaacacctaggatgagaaccactgcacaggtgctcataattttggcctcttgtagtcttttattttttatttgggaggtagtgtctcaccatgttgcccatgctggtctcaagctccggggctcaagcagtctgcccacctcggcctcccaacgtgctgagatgacagggtgagccaccgcctctggccagcacgtcttttcatgtactttatggttatttgtgtatcttctttgaagaaattttttttaagtcctttgcccatcatttaattgggttgtctttttgttgtgaaatttgtagttctttattcatatgtagagatttcaggccttttcagacatgtaggtgtaactcagagacattgcagggttggttccagaccactgcaaaaaaatgaatattgcagtagagctgccagtcacatgaaatttttgggttcctactatattaagcaattatgtttatactaaattgtagtgtagtgtattaccccaaggaaaatgtagtatttttactgaggaattatgtggatgtggccgagttttctgacccaagcatggggttagaatgtcctgtgcagggagggactgcacaggctgcctgagactctcccaggggtaccagagggctcagcaccacgagcagataggccgaggctgggctgcctgccctaagggggttccatcctcaccctggccccaagggcagcctgggccggttctgcctctgccaccagctgctgtgggacccggggctcagggcttggcccctgcgtgtgtcgtgaagacagtgctgacagatgggaggtggggctgacaggacgaggggtcaggatgttccggccatgcactgtagccctggccttgcaggacagcaggtggcttggtgggatgataggtgagttccgtgggcaggcgcagggcatgagctgccagtgtcttcctggaaggtgactctggggttgtcgctccagctggagtgtaccctcattcctgcttccataggggtctccatggaggcctcattcaaacacaggcgagcccatccctggcctgtcaggttcaccagggtggcccctggtcccgttgtcgccgttgtccacaccctgcccacctgccaatgctcctgtgtcccctgctctgctccagggccccaaaccctgtgcagagctggggtgcatcatgctgccgccccatggagaaggcctggaggagatggaagccgggaggcttcctcttacaggaagggaagccccagaaatgtgcctggcaccaagaaactgctccaagcttgttccagagtgtggggagggcttgaggcctcccctttttgagtacatggaaaggaaagcctggcattttctggaaacgctcccaagtctccctggcagggagatgtgggaagagtccaggcgcccaagctcttgcatattcacttcctcccatcacacgtgctgtgtacaagcaccctcagagctcgctttgggagacccctgcctcagggctgcgggtgccgccgtccacaccacaggcccttctgcttcctgtttccaaagctcatctcctgtctctgggctgcaggcgctgtttctggtttactggcacaactgtggttgtgtttttgtcaatgacttcatctttgctgctgttgttttgagatactgtcttgctctgtcacccaggctggagtgcagtgccgagatctcaactcactgcagccccgacctactggtctcaagccatcctcctgcctcagcctcccaagtagctgggactacaggtgtgcagcaccacatccagctaagtttttgtattttttgtagagacagggtctcactatgttgcccaggctggtttcaaactcctggactctggtgatcctctagccttggcctcccaaagtgctgggattacaggtacgagccagcatacccagccagtgttgtcgttttgatttgggagttcggggctgagctgtgtttggccagggcctcgcctgctcagtgtgctcctgggctgagctgcggtcctggagcatctcttggctcacatattgactcctccggcctctctactgtcctggtccttcatggggctcacatgtgtgtcctcttgttttctttctgtcaccttcttaagggttcacagatcactgtcagtggaaggtgttgccacagctcaagcctcacagtggaggaacctcatgaggcccttcacggggccactccctgtctggacaggcctgcctgaccagccctgctgggaagcctgggctttgctgctgcttcaccctgcgacattctcctcaggccctgcctttcgcttctttcgttaacattgttcctgccttgatcgtttgctccctcctgcctaactctgctcttcttccttgtgtagcagttacgtggtcctcaaatatcatttgttgactccagtgtttcctggggcatctcctcaagctggctggggttctctgcatctcagctgtggcgcctggtgtgagggcgcacgcttcgcagtgagagtgaaatgcccagttcgcgctggcagagggagaccctgtgaaggtctccctgtgccaggcacaggctcttattctgaaagcagaccccgtgaaggtctccctgtgccgggcacaggctcttattctgaaagtagaccctgtgaaggtctccctgcgccgggcacaggctcttattctgaaagcagacccagtgaaggtctccctgtaccgggcagaggctcttattctgaaagcagaccccgtgaaggtcttcctgtaccgggcacaggctcttattctgaaagacccagtgaaggtctccctgcgccgggcacaggctcttattctgaaagcagaccccgtgaaggtctccctgcaccgggcacaggctcttattctgaaagcagacccagtgaaggtctccctgtgccaggcagaggctcttattctgaaagcagacccagtgaaggtctccctgtgccaggcagaggctcttattctgaaagcagaccctgtgaaggtctccctgtaccgggcacaggctcttattctgaaagggtacgcagcagtttctggaaggaaggaaggagggagggagggagggagggaaagaggaaggaaggaaaggagagcgataggcacagaggaaggtagatgaagccccgcgcccccctggcggagcccagccctgttcaccgcgtgctgtgcgggtgcctgtgccaggatcagctggctggacggctatagccccacgcctgcaggccacatacctgggagagtgtgggccttccgagccttctggctcccggccccacagaggaattacggtcccatgtccctcacaaggacccttgcagagggagcagtgcatcggcacagagcaggacacaggggagccgggctgaggctgcgggtcccttgtggccgccaggtgctcacgcgtgcctcggtggggatctggcagccagatttggggtgaggatttgatgatgtgggtatccctagctggtcccacagtgacgatgggtgttgcgttgtgagcatgtaaaacggcagtgacgtctgagggtccctggacgtctttcacacccagcctcaaagcggagcctttccaggcagagcagcagctgccgccactggattgacagccccagagcagcgggatcaggccacgcggacgaggaggtgcgaggcctcgggtcggggcctgtgttctgcgggagccgcacccatcatcgctgtggcggtggcagtggagcagctgctctcgtgtctgagctgctccggcgtctctgtccacagtatagggtcttctgatgcttcctggaggtctcggaggggcttgctgcgtgtagtacccacacagcccacaactggggtgttgtcaagtgttatgacgtaggttgcctgtggagtaaaagttggccgctaagaaatgctctagacaggccgggcacggcggctcacacctgtcatcccagcactttgggaggccgaggcgggcggatcacgaggtcaggagattgagaccatcctggctaacacggtgaaaccctgtctccaccaaaaatacaaaaaattagctggacatggtggcgggcgcctgtagtcccagctattcgggaggctgaggcaggagaatggcatgaacccgggaggtggagcttgcagtgagctgagatcgcgccactgcactcccgcctgggcgacagagcgagactgtctcaaaaaaaaaaaaaaaaaaaatgctccagacacttcagtttgaaaatattggaatttatgtggggaggattagtgtgcatggaaggccaaaaatgtgaatgcatctccgcagtcatctttccaaaagccgccctctgaatcagtgaggaccctcagggtggggaacgtccccttgtgagtgtctgcagattggagtaggcagcagcggagcccgtctctgtagatggactcgcagaggaacttagttctttccctaaaggagtaggaacagctgggcgccgtggctcacgcctgcaatcccagcactttggaagaccagggtgggcagactgcttgtgcccaggagttcaagaccagcctggacaacatggtgaatctctgtgtctacaaaaaatcacaaaagtggctgtggcggcagcacctgtagtcccagccaccaagaggctaaggcagggagatcgtttgagccagggaggttgaggctgcagtgaaccgtgatcgccccactgcactccatcctgggagacagggtgagaccctctccacatagtaagtaaatggaggaatagaaacgcaagccggcatacattgtctttgacagcattttgtggataggcaagttctaaccatgggggcaacgtgggatgcagcagggtttggtgtgccgtggggcaggggtaatttgcttgtttctctaagactttgtacagctctgtaaacagattcccattaggtcgtcctttccttgtgacaggtaatagtggaggtgtcacaaggtaagtggcctgtcttgcctggttttcaggttctacggcttttgtcttgttttttgagaaagggtctgtcactcagactggagtgcagtggcgtgatcacagctcagtgcagccttgaactcgtgggctcaagtgattctcctgcctcagcctcctgagtagccaggactacaggcacgtacaaacatgtccagctaatattttttttcttttgtagagatggggtcttaccgtgctgctcaggctggtctcaaactcctaggttcaagtgattctctcgcctctgcctccccaaatgctgggactacaggtgtgagccaccgcgcccagccttctccttgtgtttgaactggagaggacagagtgctatacatgtggtcacggtttttcttcgttgaaagctctaacagtggggtcggtccctgttattaagcctgtgtcactattccctgggccctaaaagtgcacctggctcctgtgacttggggtcctttcccactcctctccccagggccccttggcctcagaaggcccccatgtgccagctcagactggagttgcctcagttgacacagcaggccccatccagacagaccagcaggtgcttctggagacaagagcaaagccttttccggcagcccggaacctgggatgagaaacgacaggtggaaggttgtccagagacacctacagcgtggatgctgttccgagtcagcgtaggagaaaggccactggaaaccagagtcacactgcgcgtctgtgcatctctggcctaccgcagtggccccggctgtctgcacattttttgtagacacattagagtcggttgaggccacacctgcggccacagactgcgaccgcgattgcagggaggagcatctgaggtggtcacggggtttgcccagctcacaccaactgcaggtcagttcctgcttcgccttcagtagcctgagtcccttcttctttttctttcacgttactagggcagttgttcgctgacgccttaattctggaacacgttccttgcccagattcttggtggctgcttgttcccttctcatcgttcctgctgtgttttccatgcttggtgtagggggaccctcagagcttggtgtagggggagcctcagagcttggtgtagggggagcctcagagcttggtgtagggggagcctcagaggtggcgtcaggacgtgcctgccccaccggttgccctggtgccctcgtcacgccccgggaccgcgcacacgtggggactgtttccagacgcactttctgcgggcagtctgtgtggcagggctccctgcccagctcctgcagcctcatcaagtctcccactaaggaggtgtcgctcctccaactttgttctttttaaaaatcgcttcagccattctaggtccttggcatttccgcgtgaactgtaggattcctacaccaagcctgctggcgtcttgattgggacggtgttgaatccagagtgtgtggcagagctggcggagcccctctttctttgatctctgccgatctccttgatttcacgtttgttttattccacagaccaccccctccccatcttctcacctacttcaggttccatttcatggtaggaaattcctgtagtcctcccgggcttgctgaagtgctgctccaagttacagtccccgggttgtcaggcgtggcgagagccccttgtgctcagagctctcacggaacacagagcaagcctgtctacgagttcagccggtgaggggcaggggctggtgaaggcggcggcgcctctgggtgtgcccaggggcagggtcgcctccaggccccacgcgctaagccgtgactccctgtaacacacccgtgtcgacacaggtcacgtgggcccgaggtgctcatacatcacactccttgtccaggatggtccttcctggcaccatgtggtcctcggtgcaaaccagagtttgcagtgctcgctgcacagacccttctgccttattcagcatctttagatcaacagagtcagtgccttcccaagagagcacgtgtgggcctcatcaggagcatgtgcccaactcgtgtgtgtgttccttctctgccctggaggagaggggtcgccctctcttgtggcccaccccggggctgcagggctgatggctgctccctccccagctccggcacctccagggctctgctgcctttagtcttccttgcgtgccctccacctccctccgagcctctgctgagacctctgcttcagggccgggcgtgttagcacagcccctctgctgttacagggctccatgtggggtctccacgtggcggagtacctcgcgacagaggctctgtgagggcagggctgggtggatgagagtatttaagtgtcaccatttcttttctttcttttttttttgagacagagttttgcttttgttgcccaggctggaatgcagtggcatgaccttggcttactgcaacctctgcctcctgggttcaagcaattctcctgcctcagcctcctgagtaactgagattacaggtgcccgccaccacacctggctaattttgtatttttagtagagacggggttgcaccacgttggccaggctggtctcaaactcctgacctcaggtgatccgcccaccttgacctccccaagtgctgggattacaggcgtgagccaccgcgcccggcctcccagtttcttttcactccaggcctctcactactgttctctaattgacacagaataattgtgcaagtgtatggggtgcacagtgatgttgagaagcatgtgactcgtgatcggcacatccgtcatctcattgaccatttctaggtgttgggaaccttctggctgtttgaaaccgtattgttgactcccatcatctcgcagtgctgcagaacactaaacttattccttctgtctagctgtcgtttctagttttacgtctttttaaaaattattcctcctgtctgtcatttctagttttatgtccttttaaaaattatttattttttatagagacggggtcttgctatgttgtccaggctggtctcagcctcctggcctcaagggacccgcctgcctcagcctctcttggggttgcaggcgtggaccactgtgcctggcctacgcctcttgtattctctgggtcatccagtcaacttgagccctggtgagggtgaggctgttgggttgggtgagtcagccgtgttgtgctgccgtaacagaacacccaagatggaagactttagcatgaacagaaacggattggcttgcagttctggaggctggcaagggccttcttcctgtgtgctcacgtggtgatggggtgaaggcatattcacccttttagaatgaactcactcctggaatcatgagcctgtcccttggtgacagcattaagctgttagtgagggcaaagccttcatggtcaagtcaccttctgaagatgccacctcctaattaggctgcgtgggcaagtgagtttcagcatttcaggagacagatgcccacaccatagcagtgacctcatctcattcagggtattggtgcttgtcagacactggctgtgactcgcatctgggtgcgtgtgcctctctctgtgggggccaccctgccgtcaggcgccaggaaaccgacgtcagggaatgtgggggtctccctgagagggtgccgacctaacacggctcctccgggtcacgtgggtgggctcagcggcctcccgtgcctcccctaggtctggagtctcccctgccctctcgttgggctccaagcctcttcctcagcccagcttcctgctttgtggcagccgtgctttctggaagctgagcagcttcttttttttttttttttttttgagacggaatttctttgtcccccagactggagtgcaatggcacgatctcagttcactgcagcctccgcctcctgggttcaagtgattctcctgcctcagcctcccgagtagttgggactataggcccccaccaccttgcccggctaatgtttttgtatttttagtagagatggtgtttcaccatgctggccagttcgagactggtcttgaactcgtaacctcaggtgatcctctcgcctcagccttccaaagtgctgggattacaggcgtgagccaccgcacctggcctcttgttcatgttttatgtgtaaattggtcctctgctatttctgttgctcagaggtggaaaggagaagggaacacgataaagtcacacatccacactgttgacaggggtttggcttccagggaacacacctctgtggcctcagggctatgtcctgaattctaaaacggggctctcacggctgacccgatgtcactgggtccccgtttgctgcttgagtctcttcggagcccagtgttgactcccgctcttcgtggctgccccggctatctggccatgaggagctgaccacgcacctggccggactcacatccgctccgctagggaagacctgggggcggaggtcggtctctgaccagccagcgtccctgcaggggactgcgagtaggaggcgggtattgcccacgccagggcctgtggtctgagagggctggcccttgacggacaggtgggcaagtccccctcccacatctctaggcaccagggcgtagcgtaccatgtgtgctgtgtttgtggttgggttcaggtactgccctgtaggcgtgtctgctctgagcctcctgggacagcctgaagtggttgctgcacagctgctttggggcctcccaggggtgtgttcctgctcccaccctggggtgctctgagttggtcttgggttagagaagtgcagtggctggtgtgtgcgcagcctaggggcctaggacctgcttctcagagcatcacggggcccaccaagaagtgccccctggggaggtgacagcgtcttccagaaatgccgccgcccacaaggaggactggcctgtgccggaagctggagatggtggggtcctgatggcacctggtaggtgagggtgccccagagaaacagagccaaggcggcggcctggagacagattctgtggaatctgcccactctgttgtggggcctgccaagctcagcatctgcagggtggaccgaaccccggggaaagagtcagtgctggattctcaagagtccagaggccatccagggcagagtgctcccctcagaggacctcagtcttttcttagtccttcacctgattggatgaggcccacccactcatggcgatcagctgatttactcagagctgactgatttaaatgttaatttcatctaaagaagtaactatacagaaacatccagattaatggttgaccaaaatctgggcactgtggctcagccaggctggcacataacattacccatcgcatgttagttggaagcttggcctttggaattaactcagcctggtcagccgttagcagccagcagtctctgttctgcccacacacctctgtggactgacccaggacacaggtgagcagcatccatgagaaactgtggtgcttctctcctatgggacagatggagccccgctcccttctgtgtggaaatggtccaggagcatcttgtgcgggtggtgggggggcgagggcagggcctccgcatgagggagagcagcgagcggcagccactccttcgccgagccagcagggccatctcctgtctgcctcaaccactactggactcagcctttctcccccagcagtgacatcaaaatagcctatttataggacataacaaagatgatgccagctgttaataaaaatgtccgctaatcaggcagttcacttgctgcagttttttggggtcccaagggcccagcccaggctcctgtgcccttggccaccgtgggccagtccctggggtcttgtgggagcctccgcgggcctgggagtggcaggacccttagagggcgagagttcacatgagagcgtggggttctgactcgcgagggttcacgtgagagcgtggggttctgagtcgcgagggttcacgtgagagcgtggggttctgactccctcgtgtcatttcagccgcggcgagtcctttgcacatgttggcaacacacgcatccgcatcggcctccctgcccacaaagcgccacaacggtgaccagccggagcagccggagctgaagcggatcaagacagaagacggcgagggcatcgtcattgccctgagcgtggacacgccaccggcagccgtaagggaaaagggtgtccagaactagcgaccgggagagcttttctttaacgatatcaactctgtggtgccaaaaggagacgcggcctcccgccagcactcgggggtgcagggccctgtggttggacttcacctctcagcactgaaaacccaaaacccagctggccttaacactccttaaagacagaagtcacacttgaacaaaacccacacacaacaaaacctgatttgggagacggtgtctccactgagcacctgctgggctgagcttctacctacgagtgaaactctgtcctcccgcgaggaccaggcatcgctgtgtgaggacggcacggccagcgcctgctgtgagtgggtctcccaagactaggcctcaggacgcggggggagccatccccgccgccctcacaggacccaccaggcagcggagacatgtggaattagagtattttgaggtgtcctttctttacaaaataatggggtcttgggcatttcacatcactccatttctactgagactttcagaatcacacaggccctttccgtggatttcatttggggcaaagaaacaacgtagttttgtttttgttttcagcctatggaatgatttccttttgtctgtcttgttcaagttcagacgaagctactctggcatctgcacatttccgtgttacagcagctgcctgatgaattttatccacctccatttcagcatgtggctcgcgtggacaggtggacggacgctgtggccgcatggaaccttgagaacccagggacgagccagtgccgggaaggaactgccgggactcaccgagctgcacttaactgttctctttctggctattttttgttgtttgtttctttgtgttgactttgtccctggcaaaattttccactctgagtaaaacaagtctcctaagtattgtgtatgtttaaaacgacagaaccatttctacttcatttggaaaaagattcagtcttttatcacaggcccttttgaaactcagatcccaggtctctccgtggtatgtttgtatttggggtgtccctccggctctaggcggcctctgacctgctgtctactccccaccttcggtgagcggccgccatggtggagcagggtccgagccacgtcctgcagggcacgtctggggcatttcctgttttgtggtaggaaatgtccctgacctttcagaaccgaacccaatcctgaggctgactcctctacggaaaatgaggacaggacgggggtgagggaatgagagtgggaggtccctgcacctcctcgcccggctcctcaggaagaaaaccgctggcccttcccgagtgtgccggccgagggccgagggccgtgcacatggggagagggcgtcagcctgatggctgagcttttaaatgtcatcatcataacattatttatttaaatgtagttattttggtatttaatttttttttagagaggaaaaaacctgtattttcctggtgggatgaaatagggatgaaatggctcagaatggtatatttaggcaattttaaaacatttattatttacataaagaccaaatatgatgaatctgttccgtgaattgtgtcggccctcagcatggggctggggcagcgtcactgcggtgacgcccattgaaaggtatgaaatgactgcacactagctggattatcactcagccgtttaagaaataaaagcaaaaccatcacgtgactgagaccgtgtgtgtgaccgcagcaaagcgcagcgtgtggatggatcagagcccctcggtgcagctgtctgcatcttccaagcactttacagataccttggaatgtatatttttgtcttcttactcagaaggtttgcagtttgtaaaataatcaggattctgctctgtcctgtgtgtggggtcagctccctccacagagggctccagctctgttggtcacagctgatggggttctctgattgataggagacgagctcttgagctctaaggaacagtgaggtcgccggtggggagcttggctgggacaccaagcaaatgcatcgtatgtccccttggagacgtttttatgcagctgtgtatgttactatccagaaggagtcgggggtagactttcccgtgtaagctcagtccataaactggttacttctgatcctggaacgtggacttcacatgataggtctggatctgtttctgttgggatcacaggtaaggaaaatgtccattcaaatggtaaagaagggaggagggtgttttttttttttttttttgccgtaggcaccattctgcatcttgaacccagactgaagtgtgcctctcacagatggaaggtgcacacgctcctgtctcctcctcactctgccacgttcacttggctttttcattggtacctaggaatttaagaatatcgaagcgagagcagtaacaaaccatagatgagcagactcccacaccgggttttcttgcccgtctttaaggcactgtttctaaattttgaacttagctctgaatccccaagaacttgagcacagcaagggttgctgagctgctgtcgccgcagccctggcccctggtgctggagctgcagcacctttgggagaggtcctgcgtcgtcctcagctgcgtcgctgtgaactcccgctctccactgtgttcctcagtgtctgcttttcaggaagtctgctgtgacctttgcccaacttctgagctcctcagggactaggaacaatttcagtagctttgccctgaaccaaacgagaaaacaaaagggaactcccgtatgacccacgtcacgtggtgcactcagagtgtgtgcggcatgatcctcggttgctcctcctctcactttagtagagtacgcggtggacagctgatctccttcagtcgtctacccacttccgtcattgtcctccgctagaataacagagtagttggtagtcatggccagaaggggggtgggggcagtgtgaggacttggggtttctgtgctgtgtgacacaaggagataagtgacaatcttgaagtcctaacttccactattctagaaagtatagtggtgatttgtgtgcaaagatttgaagttttaaaaaagtaccaagttcctgaaattcaataaaatatttttattaattttaatggaatgcagagtatcattttcattttgattgactgactttttacttcatgctctcttctgagcacaccggaggcctagcgcattggcaagaacttaaccagggagctgcactgaggaccagcactgcaggccctgccagtgggacagcgggttgagcgtgcaggtagaaaaggcgccgtgtcacaggcagtggtaacagggtcttgattgattgatctatgatgtcggagttttaaagttacttggagattgtggctgccactatttcttctgcagactttctctccaacctgagaatgaagatcactgcaaagcatcttgagggacattttctcagaaaatgaaaaagcagctcttggccggcgcggtggctcatgcctgtcatcccagcactttgggaggccgagacgggcagatcatgaggtcaggagattgagaacatcctggctaacatggtgaaatcccatctctactaaaaatacaaaaaaaattagccgggcgcagtggcgggcgcttgtagtcccagctactcgggaggctgaggcaggagaatggcgtgaacctgggaggtggagtttgcagtgagccgagattgcgccactgcactccagcctgggcggcagagcgagactccgtctcagaaaaaaagaaaaagcagctcttctgaagaggtacttgggtattcaagttcccacacaggaacactttgatcttcaggccctgaaaatctggtgtggatcgctaatgtctggaatcgtgatgacattatcagtactcaccccagggtagcagagggaagaaaccgtgctgaaaatgacacagaggcctttgggagctaaatgatgttcacggacagagagttcataacggagtgtttgttttattccttacactgatcccctaatttaaaacagttcatactggcataaaagaactgtttatcacgccctgcgagactgcctcttccagcaaagtgaagcagtcatttgtaatttgtttctgccaggtctgcgtctgcagtgcacccgggctgcgttgatgggtgctgggaaattgtcactgtttgttgccccctttctgagctatgtccacagcaacacaaaattacaattcagagtgggtctcaagtgacctctgatgactaaactggctacaaagattccagtggactcctccacctgtgtctcctaggggttatgactaactgtggacctaacaaacagagcaactatctcagtcctatggaaagtcagtcgtatataatacagaacagcaggcagactagagccagaacaaggaccggtgtgatgggtttttcctgggttttcccctcccattgctgagcctagtccgttgctgggcctagtcgggggcggtctatccgaactgcacattagggatgaacattaaaatctccaagagaagcccgcttccctctcatcctgggcagagacggtcgtgggaaactcctgcaagcagcagccctgcagacactggcgactcccacagagcccttcacgctggcgactcccacagaacccttcacgctgacgagaggaattggaaaacaggcccctgtagtccaaagagcatgagggaaatccctgctccactttggccccaagctggacctagtcataggaatgggaacagcacagagaggctgaaacctgggcttttaagtcaaaggacacagcagaggagttaagagaccccctaaagctccacatgaatggcactgacgtggggaaaacagcaaaggctatttgagctcaactcctgtgtagactggcccctgggtgaacagcacgacacagacttggaagactagcctgacaccagagtcacagctccaggaggcaggctggcacatgcaatcagaacataactgggttacttgcctgctgagacacaactcagcatcctgcagagggtttcatggacttgggagtctcaaggtatgccgaatgtctagaatacaaaattactaaacgtaaaaagagccagaaaaatctctgccctaaagtgaaaagaccgaatgccaactctcacatgacccaaatattgggaatatcagataaagaacagttattataaccatgctctgtgaaataagggcaaatgctcttgaatcaaagaaatgaaaaaattcagtgaataaacagaaaaacatttggaaacaaaaatgaactgggacttgtaggacaagattgaagggtctactgtgtatgtcactagattcctataaaacagagaaacaacgtatacaattttttttaaagaaatattttagtccgggtgggcgcggtggctcatgactgtaatcccagcactttgggcggccgaggtgggtggatcacgaggtcaggagatcaagaccagcccggcctacatggtgaaaccgcatctctactaaaaatacaaaaattagccgggcatggtggcacacacctgtaatctcagctactcgggagactgaggcaggagaatcgcttgagcccaggaggcggaggttgcagtgagcgcagattgcgccactgcactccagcctgggcgacagcgagactgtctcatttaaaaaaaaaaatacatatatatatatttttttaatttatttttatttatttatttttttgagacggagtctcgctctgttgcccaggctggagtgcagtggcacgatctcggctcactgcaagctctgcctcccaggttcaagcgattctcctgcctcagcctccggagtagctgggactacaggcacccaccaccacgcccggctaattttttgtatttttagtagagacggggtttcaccgtcttagccaggatggtcttgatctcctgacctcatgatccgcccgcctcggcctccccaagtgctgtgattacaggcgtgagccaccgcgcctggcctatatatgtgtgtgtgtgtatatatatatatatatattttttttttttttttaataaatactttaaagattcacgaaggtgagtgaattccaataagatcatctcaaggaaaaccatgttgaggcaataaactaaagaaaagacattttttttttaacctggaaagcagccaaagaaaactgacttatccaggttgagtattcctaatctgaaaactcagtaatctaaaatccgaaactttgagtgttgacacgatgctcaaaggaaatattcattggagcattttggacttcaaatttttgaattaggaatgcagggcggggcacagtgtctcatcccaacactttggggggtcgaagtgggaggctcacttgagcccaggagttggagaccagcctaggcaacttggcaaaatcctgtctctactaaaaataaaccaagtgtggtggtgtgcacctgtagtcccagccactcaggaggcccaggcgggaggatcgcctgaacccaggaagctgaaactggactgagccgtgactgcaccaccacactccagcttgggcaatgggagtgagaccttgtctcaaaaaacagacaaacaaggatgctgaaatggaaagtacactgcaaatattcaaaaataaagattaaaaaaattgcattctgaggccgggcgcagtggctcacgcccgtaatcccagcacttggggaggccgaggtgggcagatcacgaggtcaggagatcgagaccatcctggctaacacggtgaaaccccgtctctactaaaaatacaaaaaattagccgggcgtggtggcgggtgcctgtagtcccagctacttgggaggctgaggcaggagaatggcgtgaacccgggaggcgtagcttgcagtgagctgagatcgcaccactgcactccagcctgggtgacagagcgagactccgtctcaaaaacaacaacaacaaagtaaatgtaaagcaagcaggcaacaaaattgaaaaaagaaatcaaaattgaggggaaaaaataaaacttttttttatttgtagagacgggtcttgctatgttgcccaggatggtctcgaactcctggactcaagctattctcctgccttggcctcccaaagtactgggattacaagcatgagccaccatgcttggccacttctaattaaaaaaaaaaaaaaaaaaatagaaaacaggctgggtgtggtggctcacgcctgaaatcccagcactttcggaggccaaggtgggtggattacctgaggtcaggagttgaagaccagcctggccaagaaggtgaaaccccatctctaccaaaaatacaaaaactagccaggtgtgatggcacgcatctgtgatcccagctactcaggaggctgaggcaggagaatcactttgaagccaggaggcagaggttgcagtgagccgagacctcgccattgcactccagcctgggtgacaagagtgaaactctgtctcaaaacagaacagaacgaaacacacaaaggaataagaacaatgagccattcatgaggttggggcaggggacatagtgacagaaaccatccttgaagaagcctggaaattggacttactagacaaacactttgtcttaaatatgctcaaggggctgaagggaaccaggacaaagaagtaaaataagaacaaagccaggtgtggtggctcacgcctacagtctcagcactttgggaggctaaaatggggagacagcttgagcccaagagctcaagaccaggctgggcaacatagtgggactctgtctctaccaaaaaaaaaaaaaaatcagctaggcatggtggcatgtgtctgaggtcccagctactccgaaggttcaggtgggaagattgcttgaacctgggaagttaaggcctcagtacaccgtgatcacaccactgcagtttagcctgaacagtagagccagacactgcccctccctctgccccaaaaagaaagaaatatgaacagtgtgaaacatttggaaatagcagaaaatagaaattataaaaagagactaaaaagaaagtctaggcctgaaaagtaaaatagctaacataagaaattcactaaaggaatttggatttcagcaggcatcagaaagcagccgtgaacttgaaggtaggtcagtgaaattacccagtctaagcagcagagaagaagaatgcagggaaagtgaacaataaggggcctatgggataccatcgagcataacaacataagcattatgaaatttcagaagcagagaaagagaagaagacacacttcaggaaataatcaatgaaaacttccctgatctgataaagacatgaatctacacatccaataagctcaacgaaatccaagcaggaaaaatgcaaagagacccagagctaaccgtatacatactcagcagtaaaagactgaaagcttttcctttcagatcaggaacaagaatacctgccttcactactgctggtcagcactgtactggaagtcttagctagagccattgaccaagaaacgcaggcatctacattggaaggggtgaaaactctccttgcagatggaatgattatgtgtagaaacttccacagaatacacacacactcaacctactagagcctgacacatgaattcagcagtgtggtagtgtacgagatcaagataaaaataagttgtatttatatgcaccagcaataaacaatcaaaaaggaaattaaggccaggcgtggtgactccgcctgtaacagtttgggagagcaaggcaggaggatcgcttccgcccaggagttttttttgtgtgtgtgttttgtgttttttttgtttttttttttgagatgggagtttcgctcgtgttgcccaggctggagtgcaatggcgcaatctcggctcactgcaacctgcgccccctgggttcgatcgacttctcctgcctcagcttcccaagtagctgggattgcagtcatgcaccaccacgcccggctcattttgtatttttttagtagagacggggtttctccatgtcggtcaggctagtcccgaactcctgacctcgggtcatccgcccacctcggcttcccaaagtgctggcattacaggcgtgagccaccatgcccagctccgcccaggagtttgagacgaaactgggcaacaacacagggtgacccccacctctaaaacaaaatcataaaattaagaattagctaggtaggctgagtgcagtagcccacacctgtaatcccagcactttgggaggcagaggcaggcggatcacctgaggtcaggagtttgggaccagcctggccaacatggtgaaaccccatctcttctaaaaatacaaaaaattagccgggcgtggtggtgcacacctgtaatcccagctacttgagaggtggaggcaggagaatttcttgaacccgggaggtggaagttgcagtgagccgaggttgagccactgcactccagcctgggagacaaagcgaaactccgtttcaaaaacaaacaaacaaaacataaagaaattagccaggcatggtggtgcatgcctatggtcctagctatttgggaaactggagcagaaggatcacttgagcccaggagggcgaggctgcagtgagccttgattgcaccccggcactccagcctgggtgacagagccaaaaaaaaaaagaaaaaaagaagcacggctgggcacggtggctcacacctgtaatcccaatactttgggaggctgaggtgggaggactgcttcaggccaggtgttcaagaccagcctggagaacacagacaccgtctctacaaaacaataacaaaaattagccgggcgtggtggtgcacgcctgtagtcccggctactcaggaggctgaggtgggaggatcacgtgaatccaggagacagaggttgcagtgagctgagattgcatcaccacactccagcctggagtgagaccctgtctcaaaaaaaaaaaggataggcagctgtcgtatatgctgataatggtaaaaataatgtgagacataagttcaagtcccttgtgcaaatactgaaactgaggtagaaaaatgctgattttctggagttacactctgctatcaaggtcaggaggacacccttttccacagtatctggccagatccttgcctgttttttccacatacccgagagagattaggagataattagccctcagctcgcatgccccagaagcgtcgtcagactcaccatctgaaacatcttacacagatgacaggcttctggctggcagccagcatggacaactcaagatggggccgcaggtgtctgtgggaggctcagagcaaatgtcgggggattcacggcctctacagacggtggcgtctctcttgaacagagctacaaaagaaatgacatttcactagatgccacctcagtctcaagtctacatttgcttttgttaaaacccattgtatgtctacattttggtggatgttgcgtaagacaaatcattttaaaattaatgccaaaaccacaaaatcactaacctgatacgaaattccagaatgcggcaagaatattacaagctaaattagaaataagaatcctctatacatatacatccaaaaaaaaaaaaaatccccaagtattagtagaattcttttttttttttcctgagatagagtctctgtcacccaggcaggcgtgcagtgctgcgatctcggctcactgcagcctccatctgcccggttcaactgattctcctgcctcacgctcccaagtagctgggactacaggcacgcgccaccacgcctggttaatttttgtatttttagtagagacagggtttcaccatgttggccaggctggtctcgagctcctgacctcaggtgatccacccacctcaggctcccaaagtgctgggattacaggcgtgagccaccgcgcctggcgaattcagcagtatttaaggataacacactgtgaccaagtgggctttcccacaggacagcaaggttggctcaacattcaaaaatcaacgtgatgctccacgttcacggcgtaaaagataggtgtgatcatcacaacagatgcagaaaagtcacttaacaaaattcaacagccattcctagcggcaggcagggtcacccccaagtccccactcaataaaggaaaatcaggaggcatcctccaagaagacccagatgctggaatcggcagacaaggacttgaaagcgcacagagcgcgtacaaatgggcagacacaagtcatcagccacgaattagaaaccaactttagaactgacaaatgtatctgaaataaaaaaggcggccaggcgtggtggctgtaatccgagcactttgggaggccaaggtgggaagatcgcttgagcccaggaggtggaggagaaaccccgtctctaccaaaacaattttttaaataaaaatagatgttacgttcaggtgtggggttgtctgagagtgatcttctctggaggtagaaacacggggcaattttgcttacaaatttatatttttctattattttataaggaacttttttttcattgtattctctgatccatctggaagagaaaaattttggtacaagtttcaacaatgtcatcaaccaaatgcctctgacacaacagaagagagatgaggactaagtcacgtgaaagagctctggcattcaggggcttggtttggttgcagaaagaaaacacaaatataaaactctttgatcacagaaggctgcagatggccagcgcccccgactacagtggtgggagcgggaggtggccaggggttcacacaggcatcaacgccaaacacagggtgggtatgggtcagggctgcgttccacagggcacaagccgcctgtccccgcaagacatcccagggccacaggggagggaggacagaccagaaacgcagccggagtcatccatgcccacgcacctgtacgatcagacaggaaagctgctgagtaggcaccgtctgaggcagtcactctggagtcccttcgcacccacgtccggggcacaggaggttcgtgggggaggcagcagcccggccttgtttcccatacactgcgcttcccatcagttccacttgaaaagcagctgcgctcccgagtccgccggcctagggacaccgtgtccttgccgctctacagtgatttttaaaaagcacatgcctggggagggccggtgccgccagggcctcacatgaggcacgtccgtgcaggccctcgccacgttcctggtgaacgggcctgtgacacagccccgccgtccgcatcagttctgaggctgttcacgtgcactgcgagaaaacccacccttcttgcatgcatttcccccagattcatgtttatcaactggtaattacgctcctactcccccacccagagtcagatctcaagtgttagacaagccagggtgacgccggctcacttgaagctgccacttcaacatgcagggacattgctgctgccagccaccctccacctccacaggccagcaggagcctcagacctcccagagccacacaggcctcctacagatgcatttcctccctccctcctccagaggtgcccttggggcacagggagagaggagggcaggccgccccgtcccgacacagggagagaggagggcaggccgtcccatccccgacacagggagagaggagggcaggccgccccgtcccgccacagggagtgaggagggcaggccgccccgtcccgccacagggagtgaggagggcaggccgccccgtcccgccacagggagtgaggagggcaggccgccccgtcccgacacagggagtgaggagggcaggctgtcctgtcccgacacagggaatgaggagggcaggctgtcctgtcccgacacagggagtgaagctccaggctccgcacccagtgaccctggcttccaccttgtcctgtcacaggccggcgcctcttcaggcccacaggctgttctgaagcctacactccaaccagattctcacagcaaggggaagagtgtttggcttcataacacacaattctacttcccattacaggtccagactacaacaaaattagtcacttttatttaaaagaaacattacaaataagtgtgcaaaattaaacatcatgattaaatacacatgaaaggaacatgcatactttacagcaacatccacagagaattagctgattacatgacagtgacagtaaagaactaaagaaaccggcaaaaccgagaactcgctgctatgcaggttttacatgtttgcaatctgaaatcaaaaccataaaatagagtttaacgggaatttaagaaaattaaatatatatcccaagtagctgacaatgtagagcccataacctagttaccaaatgttaaaaaaagttatgtgcctctccttcccaaaatgttagtgtgtagctattcttacaaatgaggggaggggagacggtggacctgggggctcggaggccagaccagggcatttccctccacaccagcgggaactgcatggaccctcccagaccctgctctggcagacgaccccgaagttaaaggatgttttccccataacgaatgttcaaagttcgtgcatcactctgctgttccctacacataaccgggaaacaggtttaatccaaaatgtaaccaggagaccccccgtccccgccccgcacacgcctgaggtgtgacggctcggcttctagagtggcctggtgtctgcctcattctaatggccccaacggagacggggacgccacgcacgggcacaggtgacgtcacgggcacagatgaccacgttgcgggtacggagaagaccacaggctgggctcacacgaggggaaacattcacactgtgttctctctacagggtcaggtcatttttcttcatgttcgggcgggaaaaggaattcctttctccttttctaaggcaagctgctggtgttgtattcaatctgcttatcatgtaagaacttacatctgcacacttgttcactcccccgctgcagactcagtaagaacgacggaatctgctgcaaaaacaaacctgaactcgtccaccctctcagcccagtccccaggtccgtatggagcccccgtcagtgtgaggatgcggcggagccactgaagctaacgtcacagctgaactcatgggaacagccagtggccgccagtcgagctggtcacagccactgagttacctacggtgccttgatgatgattctctctttaatactggaaatgggagtccttaggaaagcagacaaccacgtatggcttcgagaccaaggtccctgggcagcccctccagcccgtggcccaggaggcccctggggcactggcaccagccccgagagtctgaaggcggcaggtggtgggtgctgtggcgcccccagctggagtcacagcttgtcatcggtcatctctagaaactgcgcgtagacatctcggatgcactcccccttggggttgaacaggaatttgtagtagctgccgtctgcacaaattgctgggatagaaggagaccattttacctgtgtgtttctttccctcaagttaaaagcaacgagtcccactgagctgaactgcaaagggcctcttggagccaggcagctgctctgaaagccctgaaaggccccagggtccccactgaatgcgttcggtcggcaccgtggccgggaatcctgactgtcttggtgtgagcatctaatcacccggtgttggctacagggttaagaaacattcttggtcatctatacaaacattggaagacctgtccctgtgatttcctgggggaaactggagggatgggggctgaagacatcccaaatggccgtgcagaccgtaagcgggacacactgagcccacaggagaaataaggggaactgggcggccatcggtgccacagcgcggtgctgggacgtccatgggaagttaggtctgacgctcagtggatggagcccaggtggggcgggtggggacgttctctccaggaaggaccactcaccaatgacggcgtttggctctgttccaaaggcacaaatgcacggagagcctgagggaacctgaaacttggagaaactccacttggaactgaagtattttggaaggaaactggctgaggccaaactgtgaagacaagaaaagaaagggtggttcaaagtttacaggaaaaaaaatcacctgcgtaagctcagaatacgctgctgaaaatacgaaaatgctccttcatatggtttgagctttaatgaattttttttttgccatgcatgacaaagcctgttgtacaattttatttaaaaaaaaaatttttttttttgagacggagtctcgctctgtagcccaggctggagtgcaggggcgcaatctcggctcactgcagcctccacctcccggcttcaagcgattctcctgcctcagcctcccgagtagctgggactacaggcacccgccaccacgcccggctagtttttgttttttagtagagatggggtttcaccatgttagccaggatggtctcgaactcctgacctcaggtgatctgcccacctcggcctcccaaagtgctgggattacaggcatgagccactgtgcccagcctgcactgatttttaaaccccaacaaatataaaattaaatgaaaaagatttcagcgctgatagcatatgaggtctgtccacaccaccctgctggggtggggggcctgtcccgtccacactgaaacactggggactcctctcatcccccggcttttccccagcaggcatcctaacacctacctggactgtttattcctttttggatcttcagctgcaaaaatatgcactgtgccgtggtcgctggatacgcagatgagggacgcatcctgattgaagttgatgctgcagagaaaaccagcacagctcaggccttgtgtggatgtggaggagtccagagacttaacccacagcacttgtcgacactgtggaacacctcaacattcccactctggaggtgccaattctgaatactgccctttctttaacaagccgacaaccatccccacagcaccacaggttgaagccacaaagccacagccacaatccagtgtatcacggcaagttttccttgggtgccccacaaatgcagctgatgagctgtgtgtctgggagagggaagggacttcttgcagaccacacccccaacatgccgctcagggctgctctcacaagactcgggtgagaaacacacattctctccaatgatcctggcctcaggaaggtgcaggctgcccctatggaggtcagctgggctggggcaggcattggccgtgtgctgtctgttctaggagcagacagggatgtgctatgcacaccacaaggcccaggacctcacagataaagctgccgtatttataaattaattacattttctttcttttttttttttttgagacagagtctcgctctcttgcccaggatagagcgcagtagcacgaccttggctcactgcaacctccacctcccaggttcaagcgatcctcctgcctcagccctgcctagtagctgggattacaggcacacgccaccacgcccagctaatttttgtatttttagtagagatggggtttcgccatgctggccaggctggtctcgaactcctgacctcaggtgatccacctgcctcagcctcccaaaatgctgggattacaggcgggagccactgcgcccggctatattaattacattttcatctcaaagacccaaatgctgctcaatactagccaagggggaggcaccaggcctcctggccgtggccacagggcatgagatgctacccaagtagggcttcagcactagacacccggggggctgtagggacaccactgtggggcggcagtgtggcctctcagactgtaacaggctggaatcagacaaaccaacatggtctccagcattgccttaaacacaagccagagcgctggtgacgagatgaaactggcaaaaacaccagaaagactaaaaataaacagggatgaacccaagcccgccagccagggcagcagcgagacccctctacaaaaacacaacaattagccgggcgtggtggtgcacaactgtggtcccagctgctcaggaggctgaggcaggagaatcgcttgggcccaggtcgaggctgtagtgagctgtgatagcgtcactgcactccagcctgggcgacagagcaagaccttccctcaaaataaaaaccccaaaaaaacaacaaaaaaaacccaccaacaacaaaaaccatcaaatactaataaatgctgaagcagggttaattatgacattctttctacttctgtgtaatttcccacgataaaaacttaaagttaatcacaatttaaaaagctgaaacccaaccccctagcagcccaagcttctccctcctctggccttattcgggggagggtggctgctcctaccccctctcccaaatcccaaaggcccacttccgtgctgtcagcccgaagttcttctccggtgaagttggaggtgcccttaccagtaaatattggctgcttgagatcctcttcgcagttcctggattaaatgccctgatgaagtatcaaatattcttataagcgtcccctttgaaaaacagtgaagtgtttcattatcaaagattcaaaactttttcgttagtttttgaaatgactcacattcacaaatccattagtccacacaagcctttctcaaactcacccacatcatctactacttaactttctcctccaactgccagcacacagttgtgcccctgagaacgagttggttggtggctcctggtcccacggcactgggcacaagtcaagagaggcttccagagacaacctcctgaccgggcagggtggactgaccctggatgcccgcatccctggctgagacccaggaggaacacccaggcccaggctccctgctcctgctacacagggagctcatctgagaagcactgtccgaatcctaagtccctcagatagctaggaaaagcagcacgggaatccggccatcaaaaaggtgaggcaaaaaaaaaaaaataaaaggacttaaacccatccatgtcagctatgctggctttcccaagaaagaggtgcccaagacctcagggaagtttttaacatctcctccagaacgaggaggactcttcagctgattctgacagctgggaaaacgagaactgctgcatcttttgtcaaacactctgacaacatccaacaaaaaatctttatatccttcaacccagcagcccctactcctgggggtgcagtaaggagccagcttgtgggggacaaggcaggagcagcctcacggggtgactgccgacagcacgggatgggtcacagatgttgcaaggctctgcgtaatcccatctacctggctaacccggagggcaccgctgcggctaagaaagcaggaagcagagaagcatccacatttgtaacggggattctatctaaagaagaaaagttgcagggagtggggatggagaatctaaagataaaaagggtaagaaaaaatgtaccaaaaatacagaggaaccgcatttctaattcatacaaaattatatctattttgttgctaatatgataccattctaaaaaatactacctaaagggctgggtgcggtggctcacgcctgtaatcccagcactttgggaggctgaggcgggtggatcacctgaggtcgggagttccaagccagcctgaccaacatggtgaaacctcgtctctactaaaaatacaaacattagccaggcatggcggtgggtgcctgtcacccagctactcgggaggtggaggcaggagaatcgctggcacccaggaggcggaggtggcagtgagctgagatcacgccactgcactccagcctgggtgacagagcaaaactcaatctcaaaaaacaaaacaaaacaaaacaaaaactacctagaaataactaaacctgttctcagctgagtcccaggagtgagcgggacacgccccaaaccgcgtgtccccacgtgctgaggagtgaccctggcactggcaccgcgtgaaagggtaggagcagggccgcactgaacctcagtgcactgtgcccacaaacggataccatcaccggcttgcggtctcacctccttaacaatttataatttcctacaaagtaacaccgggtttgcagtcttcaatgaaaactatagtacaagataccaattttctttgtaaaaatctgaattcaggcaaaaagaagtataaagaaccccagatttaaaattattttaaaaaattaacagttcttctgacctcgcaaatcaaaggacaatgtgtccaatacgtcaatattttcagttacaatctggtggtaattcaatgaagacacgttactaagcaggtaaaaaagggttttgagctgtgtgttatcaggctgtgaagacaggagcacagaagttgagtggttctgcaaaatctatgagaatatgacaaagctgtcatatctgatcactgtaatcaacttggatgtggacgtatttttgtttctttttttttttttttttgagacggagtctcactctgtcacccgggctgcagtgtagtggcatgatctcagctcactgcaatctccacctcctgggttcaagtgattctcctgccttagccttccgagtagctgggattacaggtacacaccaccatgcctggctaatttttgtatttttagtagagacggggtttcaccatcttggccaggctggtttcgaacatctgacctcaagtgatccgcctgccttggcctcccaaattgctgggattacaggtttagccactgcccctggccctgtttctttggcttatcatattttacaagacactgctttgtaaataattagaaataaaaccagtccctgggcacaagacgacctgtgaagacttcaacctgtctgatgacatgaccagccaggtccacaggcccctgaggggctccaggttggggcaggcccactgccttttgagtcttgatacagggaatggccattttgctgagcctgctgctccaggaggcacaacaccaacaaggtgagtggcacacttactttctcggatgcagttgcaattcttgttccctgcaggttgagtgcaatgcagctcaggacaccctcgtgtgcaggaatgtccacgggtggcttctccgtgctggccaggtccacaagctgcacatggcccgtgtgcgtgcccggaaaggccaggagggagttgttactattgggacaaaggacacagaggcctgcgtggagacagaggacaccaatcaagaactgcctttgatttctcacagccaaagtccactttctgcccccaaagttctccgaaaaaatagatgtatatcatttataaatatcagaaccacaaattcaatttaaagatttttcattgtaaataaagagtatgagagggctaagcaaagctacctcgcatgagacctcctcataatcaagacatctgctgaacaactttaccaactgtccatccatcatggtacgcgctaccgaaaatgcaatgcaaaattaacgactttaccaactgtccgtccgtcagggtacacgccaccgaaaatgcaatgcaaaattataaaatttaaaagctgctccatcagcaacagcgtaaaaatattaaaaaacggaggaataagttaacagatgtacaagacctatccatggactgtaacatcttgcaaaggaagaccacagaagatctgagagagagctggtcttgtgatcgtgggctggaagattggctattactatctaactcatctacagtcagtgtgatcacagctaacctctcagaaagggttcttgaagaaagacaagctgatactaagaattataaggaaaaataaaggcactggaacagcccaaattttttatttttttgagacggagcctggccctgtcacccaggctggagtgtacagtggcgtgatctcggctcactgcaagctccgcctcccaggttcacgccgttctcctgcctcagcctcccgagtagctgggactacagccacctgccaccatgtccagctaattttttgtatttttagtagagatgggatttcaccatattagccaggatggtctcaatctcctgaccttgtgatccacctgccttggcctcccacagtgctgcgattacaggcatgaccaaaaattttttttttttttgtaaagtaagaagattgcaagacttatattacctaatttcagatttactttaaacctcttatcaaggcaggatggtactgggataaagacagaaacacagatcaatggaagagaacaaaaagtccagaaaaaaaaccttgtatttatttaatcaaaacaaaggtaccaagcttagatatccacatagaacagaaaggaacccaggcgtgtgcctcactctgaatacaaaatgtacttgaaatggatcgaagatttaactttagatgaaaagctaccaaatgtgtagaagaaaacataaaagaaatcttttagcaatacttgcaaaagtgtgccagggaaaaggctaaatctacaacatataaagaattcttacggccgggcacagtggctcacgcctgtaatcccagcactttgggaggccaaggaaggcggatcacctgaggtcaggagtttgagaccagccaacataatgaaaccccgtctctactaaaaatacagaaattatccaggcgtggtggcgggtgcctgtaatcccagctacttgggggactgaggcaggagaatcgcttgaacccaggaggcggaggttgcagtaagctgagatcgcaccactgcactccagcctgggcaacagagcgagactctatctccaaaaaaaaaaaaaaaacaaacaaaaaaaatggggctgggcgcggtggctcacgcctgtaatcccagcactttgggaggccgaggcaggtggatcacgaggtcaggagatcaagaccagcctggccaacatggtaaaaccccgtctctactaaaaatacaaaaattagccaggcatggtggtgtgcctgtagtcccagctactcaggaggctgaggtgggagaactgcttgaacctgggaggcagaggctgcagtgagccgagatcatgccactgcactccagcttgggcaacagaggaagaccccatctcatattaaaaaaaaaaaaaaaaaattcttacatctcattataagataaacaaccggctaaaaaatgggcaaaacatctggggcacttcccaaaagatctcgaaagggaagaaccacagggaaagatgtcgccaccgccagtcctcagagaaatgcaaaccaaaaccacaaggagatgccgttaccagtgagatatcatcacacacgcacggaacggctacagctagaaagaccgacaatgctggaacactcataaatcatggatgagacgcaaggggacacagccactctggaaaataaacggccgcattttatagtcagacacaaccacaacatggttgtgaccgggcagtcgaaccctcaggatcgacccaagagacatgaaactacccacacaaaggctgctatgggaacatgcacgacactcctccttcctaatagccaaaacacggccgaagggaccaacaaagtaacacacatacacacacacagaggacaaatacatgtaaaaaaacaaaacctgagggttgagtggggaggggactgtcccaagaaagttttccaggagaagagactgttctttttttctttagtctcactctgtcgcccaggcgggagtgcagtggcacaatctcggctcaccgcaagctccgcctcccgggttcaagcaattctcctgcctcagcctcccaagtagctgggactatgggcacccgccaccacatccagctaagttttgtatgtttagtagagatgaggtttcaccacgttgaccaggatgctctctatctcctgacctcgtgatccgcccgccttggcctcctaaagtgctgggattacaggcgtgagccactgcgcccggccgactgttctgtcttgactgtgacggtggctacacaactgtttacaatgacggaaatttattgaagttttttttttttgagatagagtcttgctctatcgcccaggctggagtgcaatggtgtgatctcggctcactgcgacctctacctcctgggttcaagtgattctcctgcctcagcctcccaagtagctgggactacaggtgcccgccaccacgcccggctaattttttgtatttttagtagagacagggtttcaccgtgttagccaggatggtcttaatctcctgaccttgtgatccgcccgcctcggcctcccaaagtgctgggattacaggagtgagccaccgcgcccggccacaaatggtattcttaaaacgagtcagttttttgtaaattttaccctaacaaagccagaggcaaaacccccaatataaaaagatatgaagatggtacaataaatgacaaagtcaaacacaatcaatcctccaattcagaagacaagggaaggaaaggcttgagtccagaactcagtggctcccgaagtggtgaaaacataggttcctggttcactgtggaggttctgagagcccatagtcactgggtgggaggggacaggggcccccactctgtgactctggtcagaaggtagtttggggatgctgagctgtgggtcctggaaggtccatctcctctggaggcccctctgtgctcaggattgctctcgccaagcactttgctcagagacctgcttggagaagggagtgcccagcacaggcatctccatgtggacccatttcccatcgccacccgtctgctcaatctctcacctttggggttatagcaggtttcgaagacgtgcaactgatggggattgtgtgtgaatgtgaacaccttaatcatggagtccaaaaccaccacaattctggaaagaaaaacatgatcagagttgctttcctcaagagtcaaacccaaacattttatgctcctgttcttatcatactgaaactgagaaacactgaaaataccacacagaaaaggagtgttcctgaagaaaaagctctggaggcaggtagccagcgccaggcctggagctcggcgagtgcacgtgggctggctctgctgagggagtgcttctcgcctgggtgaaggtcagcctaagagacgtctctgaggttcagagagacatcatcaaacactccatctaggttcagaaccgagcaaaacagacagaagtgatatttttatgctactgtgtctggaaaaaataagaaaagtctgaaagtagaatatcctcgatctggctcaagcgtttgcattattattattattactttttttttatagatggagtctcactctgtcgctcaggctggagtgcagtggcacaacctcagctcactgcaacctccacctccagttcaagcgattctcctgcctcagcctcctgagtaggtgggattacaggcgtgcaccaccatgcccagctaatttttgtatttttagtagagatggggtttcactaggttggccaggctggtctctaactcctgaccttgtgatccgcctgcctcagcctcccaaagtgctgggattacaggcatgagccacggtgcccggccacatttgcattactaagggcctttaaatattgacgttattaaaatgacaaacccacacaaaaatgcaggaaagttggccgggcgcagtggctcacacctgtaatcccagcactttgggaggctgaggcgggtggatcatgaggtcaagggatcaagaccatcctggccaacatggtgaaaccctgtctctactaaagatacaaaatcagccaggcttggtggtgtgcgcctgtagtcccagctactccggaggctgaggcaggaattgcttgaacccgggaggcagaggttacagtgaactgagattgtgccactgcactccagtctggcaacagagcaagactctatctcccaaaaaaaaaaaaaaaaaaaaaaaaagggcagggaggtgaaatgacctctgtttacatccaacttgctcggctgctgtcctcccacagccgacagagatggaaatcttagagtaaaatatgcaaatcatattaaataaaaacccaaatgaacgaactctgcgctatcttgctcaacgtactaggacaaacttccatattccccctaaacgcccctgagaccatggctgacagaaccacctgctactttcaacacagaaaattcaattttcctttaccttcaaaccgaaaacctttattgagaggcagcatttggcaaagcaggggctaaaagcccagggtaattcaaggctcaaaactcatgtcctcagctctgcacatgtcggaatgggacataactcaccacggtgagacccactggctggtccactgtggcgcacgtcatccacgccaccacctacttacctccagcggagccctggaaacaaacacaattcgctgcctttcttgcagcaatataaataatccttatatccttatggtcataaaaaccaggaccaacattttaatacatcatttcctaaacatttttctgccaaaaatagaaaagtatttcagccatcttttgagaaagtgaaataccactttaaaaaattactgacaccaaacccacctatctcgccgcagcttgactgccttgacttctgtagaaaattctatttcaataacagtcttcttcttcaggtcatcccagatcattactgaaatatcagaaagaaaagatgaatgcagtcatcagcaggccatggcgctgggatgcagcgatgccagcttggcgcctaaggtgttttctcttcccactggcacagctgcgcccaccctcaggcctcagacacacacccgcacctgggaggccttggggtgtaactcaaaccgtgagctgtgccagggatccgccctcgggcaccttccccactcaaagcgtctccccttcttggtagctggctgcccacttgctccctccccgcccattcctctctcagtgtgcacagcccggtcctgttctcaggtgacccactcactggcctcacacacaggcacgctaagcgcattcatctctctctgccaaccattgctccctccccgtccgttcctctctcagtgcgcacagcccggtcccggtctcaggcgacccactggcctcgcacacaggcgcgctgagcgcgttcatctctctctgccaacccttgcccttgcctggttacgttcctctccctgaccttccttgattccacccgactgagcccataggcaagcctgaccataggtactgatgttaaaagtgctgcaaataaacctgcatcaggaagggaggtttcagttttaaagtgaaatcagagggacacaaatcagggccaacaagttcctcactccactcaaggtcctgggttgttcttcctctttttctgtttttctttttgagacagggtctcattctctcgcccaggctggagtgcggtggcgcaatcttggctcactacagccttgacctcccaggctcaagagattctcccacgtcagcttcccaaatggctgggactacaggcatgcactaccatgcccagctaagttttgtatttttggtagagatggggttttaccatgttgtccaggctggtctcgaacttctgggctgaagtgatctgcccacctcaacttcccaaagtgctaggactgcacgtgtgagccactgcacccagcccctgctcctttttaagttcaaaatttcttctgtcttgtttgcctgctaacattgcaacattctattagcataaattagcagtttgtgttctaagggctaatgtaccgacaagctttagggatgagaatgccaaccagcaccgtgcttttgaagaaccacaggagggatgggtgcggtggctcacgcctgtaatcccagcactttgggaggctggggtgtgagatcgcttgaggccaagagttcaagaccagcctgggcaacatagtgagactcccatttctgaaaaaaaaagttattaaaaattagtcacagctactcaggtagagtccaggagtctgaggctgcagtgagctatgatcaccccactgcactccaagctgggcaacagagggagaccctgtctcaaaaaaacacacaaaaaacacagctgggtgtgatggctcacacctgtaatcccagcgctttgggaggcagaggcaggcggatcaatggagctcaggagtttgagaccagcgtgggcaacatgtggaaacgccgtctctactaaaaacacaaaaggtagccgggtgtggtgggtgctccggtactcccagctactcgggaggctgaggcggaaggatcacctgagcctggggaggtagaagctgcagtgagccaggactgcgcaactgcattccagcctgggcaacacagtgagaccctgtctcaaaactaaataaataaaaatcaagtttactagtaaaaaaaagtacctttaaacgctacaaaaagtacatttactcaaaaacctgctgaatactgctttcttctaagtctgtgaagtttctaaggctttttcacctcttagaaactttataatgagaatgagacctgagattatctcatacaaatggctcccttgttagcacctggggtcccccagcagtgccagaggtagggcaagggaggcggccctctaggcctcctgacttccatctataagcttcctttcctccttaatggtcaatgaagttctccatgacaagacacagaccaattcaccagcaggatttctgcccatccccaattagccagggcaaagtcattctcctgcaaatcctgccctgctctctctgtggaacctccgctgtcccttctgggtgggctcctccagaggactcacaagccacaggcctctgcccctctgggctatgctagcagccactctcaactctgctttaaagctggcacagacaaaccttgtgagattacagaaccgctcaaaggccaagatctcaagccctgtcttccactgtttttcctaccgataatctcttcccatttcatttctctgttcctaattccaaaacaaaaataaatgtatcaggcagggccagtcctcacccgagtgtggtctctcttccgcacattcacgttcacgcagttcacggggctctgctgagaactgtgagctgggccccaaagcttgtcacgagtcatctggaaccttctgcctttccacacaatccttttgtgcctgatctgacctgggctattctattcctaagtacgtgatatcacccagatcctagttcacccactcacttcccatttggcatgcggcgcccccagagccccatcctggtcttgattctgaactgcctccctcactgagcctctccttccctcctcacctcctcccaccctacccacccaccactgggctcccactcagtcatcctctgagaccaccggtggccttcaatgtcaccagaaccagatggcttttctcaggcctcctcccgcctggcactgggctcagacgaggatgcttgctccacttttcctgcctctccccataaacgggggcttcccacacctgccccatcctctggtgtctcttcactcacctcatgcactgcatctagaccagaactttcccaaaacacagatctgacggcatctccttcctggccacacgttacctggcattcaagcctcccccagatctgcctcccacctcccccacccagcctacctcccgcctcccacctcttccctgtgttctgccctccattcctggatctttcgccttgagccctctttcctcaaccaacagcgaggttaagctggcacgaggcacacggctgtcaggaaagctatctactcctccctctacttaaaagggccagagctcttacgccacatcatctgcatacacacacgtactcccactccgacaaacatatcccgaaacccagagcccaagtggtgttttgttccacgtggctatgaaactaatgttcctttaagtcaatggctctctgtaagaaaaaaaatccttctaccttgctttaaaatgaattcatgacatttacgacgtcaacctaaggtgcagcaggcccgttttccgtttactgactgaaacgcacgtgttctatgacaatgcaagcgagtgatgctctttaggtgctccatctgggaatagagacctggtgccctcttcgcctgcttcctccccagtgaccagtcctggatatttcacagaactactagggaaaatcacacatggccacaaacataaacgcattcaaaaaaagactgggtgggacacgtgaggcatgattcttcaatacacaattacagtacctttgttgggagggtatttcggcttttttccaccaccaactaaagctaaatagttgcagcgaaataacatttcaacatggccaactcctccttctagaaattctgaaatgatagttttaaaaagaccaatgttacaagttaatatgtatattttacaataaaaaagaaaagagaaagtcaagacaggtaacgcagcaattttctattttttgtaagagacaagatctcactgtgttgcccaggctggaatgcagtagctattcacaggtacaatcacagctcactgcagccttgaactcctgggctcacatgatcctcctgcctcagcttcccaagtagctgggaatacaggactcattttttttttttttttttttttttgagaaggagtcttgctctgtcacccaggctagagtgcagtcgcgcgatctcggcttactgcaacctccacctcctgggttcaagccactctcctgcctcagcctccccaggtagttgggattacaagcatgtgccaccatgcccagctaatttttgtatttttagtagagatggggtttcactatgctggccaggctgatctcaaactcctgaactcaggcgatcagtctgcctcggcctcccaaaatgctgggactacagacatgagccactgtgcccggcctacaggactcatttttaatcagcaatttatatctaactatcgtcagaaatgagaaaggtgactggctaaaaaaatagtgagtgctaggtttccaaattctctcagtttactgtcatcatgttcactgtttcataaaggctgagcacacaacaccctaggaagctaactcagcaaaatgtatgaaatacttgaattcacatttcaagaggtggcaaaacctgtcaactccaagacagcatactaaaagctttaatgcttgggaggctgaggcgggcagatgatgaggtcaagagactgagaccatctgggccaacatggtgaaacgctgtctttactacaaatacaaaaattagccggcgtggtggcaggcacctgtagtcccagccactcaggagctgaggcaggagaatcacttgaaccccggaggctgaggctgcagtgagccgagatcacaccactgcactccagcctggtgacagagcgagactctatctcaagataaataaataaaaacaaaaataaaaacaaaccaaaaaaaccccacaaaactttaatgcaaaagctgagtgacttttatcatttcctttttttttaagaaacagggtcttgctgtgttgctcaggcttgagtgcagtgaagtgatcacagctcactacagcctcaaactcccgggctcaaggactcctcctgcttcagcctcccgagtagctgggactacaggcacacatcaccgcgcctggttaattttttcagaaaagtttttgtagaggcgaggtcatactgtattgcccaggctggtcgtgaactcctggtctcaaacaatcctgccatctcagcctcccaaaatgctgggattgtaagtgtgagccaccgaagtctgaaatgctcccaactgttcatgaattacgtaagaggaaaatgtccacaaattttcagaggtcttccatgacaaaaggatgaccaatgctctctgaggggagcaacaggggcacactgatgagaaactcccacgttctgcatggttcacgtaactcaggaggaccatccacccacccacttctgtgtctgcaatgaccatgagctctatctctccagtcacagctgcacgaaatgactcaaaagttcctcagctcgatcttcgagatatttaaaattcaaggcagccgggcacagtggctcacatctgtaatcccagcactttggcaggcagaggtgggaggactgcttgagcccaagagttcaaggccatcctgggcaacataaggaaatcccttctctaccaaaaataaaaattaaaaaattcgccggccgcagtggctcacgcctgtaatctcagcactttgggaggctgaggcaggtggattacttgaggtcaggagttcgacctggccaacatagtgaaactccgtctctactaaaaatacaaaaattagctggctgtggtggcaggcgcctgtaatcccagctatataggagtctgtggcaggagaatcgcttgagcccgggaggcagaggttgcagtgagcaaggattgcaccactgcactccagcctgggcgaaggagggagactccatctcaaaaaaaaaaaaaaaaaaaccagcacgggcaatgtgcttttgggacatcaaacttttgtgcaccaaaggacacaatcaacagaatgaaaacacaacctatggaacggcagagcatatttacaaaccacacatctgatacagtgcgtaatatccagaatatatgaaggacttttacaactcaacaataaaaaaattaataatctgattttaaaattggcaaaggatttgagtagtgtttcttcaaagataatttacaaatggccaacaagtacaaagaaagatgctcaacttcattaggcatcagagacatcaaaaccaaaccacaatgagatcccaccacctcatacccatgaagatgactaattttttttctttttttgagacagtgttgctcaggcaagtgcagtgatgagaacagggctcactgcagaggatggctaatattgttttttaacccaggaaataacaagtactggccaagatatgaagctatgggaactctcatgcactgtctgatgcagctgctctggaaaaaagtaggacaggtcctcaaaaaattaaaaagaggctgggcacagcagctcactcacacctataatcccagcaccctgggaggccaaggcaggatgatgacttgaggccaggagtttaagatcagcctgggcaacacagtgagacgctccctcaattaaaaaataataaaaaggccaggcgtggtggctcatgcctgttatctcagcacttcgggaggcaaggcaggtggatcacttgaggtcaggagtttgaaaccagcttggccaacatggtgaaacctcgtctctactaaaaattcaaaaaaattagccaggcgtggtggcaggtgcctgtaatcccagctacttgggaggctgaggcaggagaatcgcttgaacccgggaagcggacgttgcagtgagccgagattgtgacactgcacgccagcctgggtgacacagtgagactccatctcaaaaaaaaaaaaaaaaaaaaaaaaggctgatttttataaatcaaaaagttaccaaatgaccagatgcagtggctcatacccataaacccaacaccttgggaggccgaggcaggcgaatcatgaggtcgggcgatcaagaccatcctggccaacatggtgaaaccctgtctctactaaaaatacaaaaattagccaggagcggcagtgcacatctgtaatcccagctactcgggaggctgaggcaggagaactgcttgaacccgggaggcggaggctgcagtgagccgagatctcgccagtgcactccatccagcctgggcgacagggcgagactctgtctcaaaaaaaaagaaaaaaacaaagttaccatatgatccagcaatcccacttctagtcatacaagcaaaagaactcaaggcagggtctggaagagatacccgcacacccacgcttgtagcagcatcattcacaatagcaaagatgcagaaggacccgagtgtccacagatggagaaatgaacaaacagcacgtgctccatacgtgcagtgatttattattcagccttaaacagaaacaatatttctcatttatgattttgtcaagataaggtctcactatgttgcccagactggtctcaaactcctggcctcaagcaatcctcctgcctcagactctgaaaacactgggattacaggggtgagctgcggtacccggcctgaagttctgacccaggctgcaacagagatcaacctagagaacactacactaagtgaaataagccaggcatatatgatggcattcacgggaagtccctacagcagtcaagttcatggagacagaaaagtagcacggtggttactaggagacaggggaggcagaattgatggatgtagactttggcttcccaagatgaaattctagaggtccgtttaacaacaatgtgaatatattcaacattactgatctatgcgcttaaaaatggttaagatggtaaattttattttacataattttttaccataattttttttttaaaaaatgctgccactgaagaccttctttgccccaggtgtcagaagtgtaactatttcctcaatgtaggttcagtaagttttagaaacacatctgagtgacctgagaattatgtcaaggtcactaatgtactcttcaaacactatttaaccgagagacaatgtttagcccttttataaactacatgatcttaggcttattaataaagttattaatgcttgattatatcataagtcttttcaggttttttttttttttttgagatggagttttgctcttgtcgcccaggatggagtgcagtggtgcgatcttggctcactgcaacctccacctcctgggttcaagtgattctcctgcctcagcctcccaagtagctgggattacaggcgcccatcacacccagctaatttttgtatttttagtagagacggcgtttcaccatgttggccaggctggtctcgaactcctgacctcaggagatccacccacctcggcctcccaaagtgctgggattacaggcattagccactgtgcgcagccgtcttttcaagttctaaaagcaacaagtcattcccttagcaagatgtgattctagctaatggttaagtaaagaaatgttggctgggtgcaggggctgacacctataatctcagcactctgggaggccaggccgaggcaggtggatccctcaggtcgggagttcaagaccagcgcgaccaacatggaaaacccccgtctctactaaaaatacaaaacttgccaggtgtggtggcgcatgcctataatcccagctactcgagaagttggggcaggagaatcacttgaacccgggaggcagagggtgcggtgagccgagatcgcgtcactgcactctagcctgggcaacaagagtgaaacttcgtctctcaaataaatacataaataaaaaataaaaatacaaaaatcagccagctgtgtagtcccagctactcgggaggctgaggcaggagaatcacttgaacccggcaggtggaggttgcagtgagccgagatcacgccactgcactccagcctgggtgacagagcaagactccgtctcaaaaaaaaaaaaaaaaaaagaagacaaacacagtcagtcacaggcacagttagctatgcggtctctgggttttaaaaatggaaagaaaaaaaagaaaaacagatttttcagaatcaagtgaagaggcagagaaggagagttaaggcctttcctggaatgagaagtaatcaaaggtaagagccaaacttcaggaattagagaggacttctaaaccccgccaaagagattctcccataatacctgacccccacctcctgcagctgaagagggggaaagggtctccccacagaaagaccagggttacattcagagctttctatgttccagatcccaagggctggtactgaaatattacaaaggatattcgttgttacagaaaaatgtaagatacaataaatctttctgagtttctcttcaaagggtttatttagcctgttaacttccttatcctttgttctcgaactcgactttcttgttcttccttgcccctagttactgtaaacagcctacccgcttcccgtcaactctaatcaataactcacacctgttcccttggttacctgtacacattgttcccctgaaactgcacgtctcacacgctccacctctgtacctcacatccccctccccttctatatttagaaaaatatgtacaagtagcctattgggtcagctcagattgtgcagtccgaccccagcccataggggagtgacacagagatagggactgcgttcaggataaaaacccccggtctcctttgttctctgtgctcttgccatcttgactgatgcaaggggcacccttctgcagaagtaaattgccttactgagagaattaaacttttgcctgagtgctggttttacttcacagcactgagcatttatttattcctggaacattttatacccacaaaaagaagaaatgcccaagcctgcccaggatgtcagcgtctacatctctaagggtccctggcggtcggacttgtctgtaacagcaactaaaattgcagcaataggttgcgtaggacacaaaacaggctcctactaaacatcagctgaggaaaacttgaggtacaccccagtccttgtggtacagagaaaaaccctctcctctaatcatggtctctattctcacacaatcaccaacacagaagacttctgtgactaaagcagaaaccgcacagcaaaccccagctggtcttcctctaactcagttctgacaccatctacctggagagagtattagatcccacaggttgaaggctcagtccccaagaccgactgcaccacacaccagtcacaagttagaaccttcaaaacttctgactgaccagcttcaagttggggttcccgtgaccccttctttgggttcaatttgctggcacggctcaccgaactcagggaaacacttccttatgtttaccagtttataacaaagaatattacaaaggatacagatgaagagatgcatagggcaaggtattaggggaaggacacaaagcttccgtgaagctctctgaaccccgtctccttgggattttatggaagcttcatgatatcagcattcctttcccaggggcagagggtacggccttctctggggagggtcctgagacccacaattagaaagggtgggggtgtggtggttaatgcctgtaatcccagcactctgggaggccgaggcagacaaataacttgaagtcaagagttcgagaccagcctggtcaacgtggtgaaaccccatctctactaaaaatacaaaacaaacaaaaaaacgtagccaggtgtggtggcatgtgcctgtaatcccagctacttggaaggctgaggcacgagaatcgcttgaacccatgaggtggaggttgcagtgagccaagatggagccactgcactccagcctgggagagattctgtcaaagaagaggggaggcgagggaaagggaggggagggaaagggaggggaggggagaggaggggaggggaggggaggggaggggaggggaggggaggggggaggaggaaagaaagaaagaaaaaagaaaagaaaggaaggaaggtggggtggtggtggggagacaggacacgttagggtgaaaggggggtaggagaaggtcagaggcctcccctgagggccaatattgtaacaaaaagactaaccaggtctgtgggagttaccggccagggtgaaaaccaaaatatataattacaccacatcttgacaggcccagactctcccaacagagcctgctgcaaaacacaagaaactaataaaagaaaatggggaaaggggatgtctgaatactggcataacttctattccactaagagatgcttgaaaaatgaatcactttatacaaatgagtgaaaatcaaccattctagcacttgaggctaataacctttttatttttgcctctgtcatgtcgtgcagtccctgtttctcgttcctatttctgtggagttttatttttaaagaaaaccttatttcccattataaaaattatgcatcatttctataaaacaacacagaaaagcataaagtagaaaacactgtgaaacaacatcatttatgtactttttttgagacagagtctcgctctgtcaccaggctggagtgcagtggcacgatctcggctcactgtaacctccgcctcctgggttcaagtgattctcctgcctcagccttccaagtagctgggactacaggcacccaccaccatgcccggctaatttttttatttttagtagagatggggtttcaccatgttggccaggatggtctcgatctcctgacctcgtgatccacctgcctcggcctcctaaagtgctgggattacaggcatgagccactctgcctggccacgtatgttctaaactttgtgcatagatattttgttcctataacaccatctatgctattctctactttctttttcctttaacaatgccatggccatctctccaaatgaggattcagattggtctcggcattcttaccgcatgaagcaccattttgaggatgtgccacaaccacagtaatcacccctttcatgaaagtcattcgggttctccaattttccactcttggaaacagcgttgcaagtaatattggtatacaggcaccaaacagtacatctataatgaacacagcttgccaaattactccacaaggctctaccaatttaaccttctaccaccaggttaccaaacttcccctttccacctccttcccaaagctacccaccacctctgtgtcctccccacccgcaggaaccacctgctacctacacattgcaggcctcccatttctctagcaccttcacctggcacgctgggtgagcacacagcacgaagcctgcaggacctgttgtgaagctagatgtgctgaggctgccgggctgtgtgtgtgtcgggtctggcgggctgctgggctgtgtcaggtcgagagggctgccaggctgtgtgtcaggtcaggtaggctgctgggctgtgtgtaggtggggcgggctgctgggctgtgtgtgtgtggggtcgggagggctgctgggctgtgtgtgtgtcaggtcgggagggctgccgggctgtgtgtcgggtcaggtgggctgccgagctgtgtgtgggtcgggagggctgctgggttgtgtgtgtgtcgggtcaggtgggctgctgggctgtgtgtgtgtcgggtcaggtgggctgctgggctgtgtgtgggtcgggagggtggctgggctgtgtgtgtggaaagaacaaacctgggtgtacaatggatgcaggacctatgtcggggagcagggttggacaacactgccccccaagactgaaggagcagggatccccaagaaggcttccctgaactaccagcttcccgttcctgccaagtggcagaaggcgtatctggaaacagcagcctgctcagagcccacagtctccttactcaatgcacagtcaccctggagagaaccatgccacaagcccagatccaggacacactgtcatgcaggcttccttccccaccactcaggaaagcaaactgctacaattaaaaaggaacaagggcaagtctggtgctgctcttcactgggatttttttcttttttttttttttttaagacagagtctcactctgccatcaggctgcagtgcagtggcgagatctcggctcactgcaacctccgactccctggttcaagcaattctcctgcctcagcctcccgagtagctgggattaaaggcacgcaccaccaggtccagctaatttttgtatttttagtagagatggggtttcactgtgccggccaggatggtttcgatctcctgacctcgtgatctgcccaccttggcctcccaaagtgctgggattagaggcctggcctgctcttcattgttaaactgtaagctgccagacgcagagcagcagatgagtctgtaagtgcagagccaaactgtttaaatgtgccatcaaaaagacagtgtggccctactgtatccatttcacattagggcctatctactcacataagctggaaacgggagcacaccacacatgcacatgtgagaactcactgcatgctaagctcagggacagcctgccccagacacagccgagctggcagacgcacaagaccgggtatatgtgtgtgatgagctaaaccatgacaatggtatacttttctggaatttagaagttttagatgtttcttgtctgggttttttttttttttgagacggagtcttgctctgtcgcccaggatggagtgcagtggcgcaatctcggctcactgcaacctcggcctcccgggtttaagtgattctcgtgcctcaacctccccagtaatttgaattacaggtatgcgccaccacgcctggctaactttttgtatttgtagtagagatggggtttcaccgtgttgcccaggctggtctcgaactcctgagctcaggcaatctgctcgcctcagcctcccaaagtgctgggattacaggcgtgagccaccgtgcgggccgtcaaactcatttttataagaaatgttgaatttactgtaaacacttcattaattaggaagcagttgttaatatgctgttgtggtgttatgagagagacacatacaggttttcacccacggttcctggctcataactcccagaccttgttacaatcttttgttataatattgggtgtgttaggccctcaggaaccagaatctctctcctgccctttcacctgctaaggcagaactcaaatcttctccacctgattgtgggtctgaagaacctccatagagaagctcccaccctgcacactaggagaagcaatgcagatactatgaagcttccttaaaaatccaagaggtggccggggtgcggtggctcatgcctgtaatcccagcactttgggaggacaaggtgggcggatcacgaggtcaggagatcaagaccatcctggctaacacagtgaaacaccgtctctaccaaacatacaaaaaaaattagccaggcgtggtggcaggtgcctgcaatcccagctactcgggaggctgaggcaggagaaaggcctgaacccgggaggcggagcttgcagtgagccgagatcacaccactgcactccagcctgggcaacagagcgagacaacgtcagagatagatatgtatatatctccaagaggtattttctgtaacacatgtgggaaaaaagagaaaaaaaaaatcaaagaaaaatgaattttgaagtaaaaaaataaaaaacataaaaatccaagaggtcagctgaacacatggaaggttctggagggtggcagccgagggagggcttggaaactccatagcctgtccccccacaccttgttccgtgcttgccctcatctgtattcttggcaattatcctttacaatgggtctgcaaccccggggcagtactggtccgtggcctgttaggaaccaggctgcacagcaggacgcaagcagcaggcgaacaagcatccccaccaagctctgccccgacagatcagcggcagcatacgattctcacagaagcatgaaccccactgtgaacggcacacgcgagggatggaggctgcacgctcctcctgagactctaatgcctgatgatctgagtgggaacagtttcatcccgaaaccatccccctatgaaaaaaactgtcttccatgaaaccagtccccggtgccgaaaaggctgcagaccgctgctttataataaactggtaaatgtgcttccccaagttctgggagccgctccagcacattaattgaatccaaggagggggctgtgggaaccccaacttgaagccagtcagtctgaagtttaggaggcccagactcatgcatggtggggactggggcagtcttggggactgagccctcaacctgtgggatctgactctatctctaggtagatggcgtcagaactgaaaggacacccagctggtgtccactgcttggtgtgtggggagaaattccccacattcagtcacagaagtcttctgtgctgacaactgtcgtgctgttaagagtggagagaaaacatggctggggggtttttcccacacagctgctaatgattcaacttggacaccaacgtctacaactctcctgtaagcttctgggtcaattcagtaaaaagtatcctgagatttgcaagtcaagctgttttaaaatgttttgcaactacttatctgcataaatcccatcattatcccatcatacatttatctgcataaatcccatcatacagtgtatgtggcatcatacactccacagcacctaatgtgcgcgcaggcattaatctgcgtgtcttacgcaccctgactcatttttacaataactctgaggcaggcattgttatcaaccttatttcacgtacaaagaaagtgaggtggccggggacggtggctcacgtctgtaatcccagcactttgagaggccgaggtgcatggatcatgaggtcaggagttagagaccagcctggccaaaatggtgaaaccccgtctctactaaaaatacaaaaattagccggttgtggtggtgggtgcctgtaatcccagctactcgggaggccgaggcaggagaaccgcttgaacccgggaggcggaggttgcaatgagccgaggtcatgccattgcactccagcctgggcgacagagcaagatcccgtctcggaagaaggaaaaaaaaaaaatagaggcccaaagaggctgagaaatttgcccaaggtcgcacagcaacctggtaaagggcagaaccaggactcaaacgtacacagcatggatgcaggctgaggaaatgcaccctgacttacaaaataaactcccagacataaagcaccacttactgttctacatcccagggttacaggtaagactttacttgaaaagaggtttctgctgccaaaaatccctgatgtgacaggaaaaggcacaagaagttcatgctgatcgataattcactagagaaatcaggccagtgaacaaacctgctcaacacctgtatccctcagcacctgtagaagctcaacgaaagaaagaggacagctccctccaagtttatgaggggccatgaaccctatttacttctcgaaaacagccatcccttccctgctccacctgcaaggttaaatttaagactccgagggttggaaaggggagaaaccagaaaatgtcccgttaattcttaccttgtttctctttttcttttagtggatcagtgttatagactcggaatccattttccatcccacacgcaaagcatcctaaagcagaagtgtaaaagagacattaatccccaggcctggagtggttaaaagaaagaggtctggagaaatgacaactactgagaactcttgcagatgctcaaaccacacagacacgataggtgctaagtcacaactcctgtccttgtacaaatgttactaagtgacaagcacatccatgcagggcattttgtttgtcctttagcaaaggagtcttggagttgttcacacaacttccccactgcaggggccttctgtggcatccccatggcccaggcttggaggacgatcagtgacaaacgtgaaggacacttctagaggaaagccaccaagcaggcaatcccgcccactgtggacaccaggtgaagggaagggcagggtgctggggagacaagaggtagtcctagactccaggaaccgggaaggtgaggaaaggatgctctttcccatttacagggtggtctcccgtgactttgctcccacctataaatcatcctaactccttaaaatcctgtcagagtctcaatgagttacccaggtcactcatcctggtcactgcctccaagtcacacagcaggctgttaatggtccaaataaacagcactgttagaaactgaataaagcacttaagtgcgtagatgatcgtgtgttaatgctcgtgtgtgacccagggactacatccatctccttaaatgccatgtccaactgttggctctatgaagctgtggctggaaagagaaaaaaacaaacccctcaattatttttcacatgaaatgttgcaaagtctggatctttccaatgactgcacaagtggtgtgaaagcccaacacaaaggcctctaaaactcccatttgaggccggacgcagcagctcacgcctgcaatcccagcactttgggagaccgaggtgggcggatcacctgaggtcaggagttcgagaccaccctggccaacatggtgaaacctaccctccactaaaaatacaaaaattagccaggcatggtggcatgtgcctgtaatcccagcactttgggaggccaaggcaggtggatcacctgagatcaggagttcgagaccagcctgaccaacacgatgaaaccccgtctctactagaaataccaaaaaattagccagtcgtggtggtgagcgcctgtaatcccagctactcaggaggctgagacaggagaatcacttgaacccaggagggggaggttgcagcgagctcagatcacgccactgcactccaacctgggcaacacagcaagactccgtctcaaaaaaaaaaacaaaaataaaaaataaaaatagaaatacccaaaccacctcctagaaatccacaagaaaaaggcaaaatcctcaatagaaaaatgggcaaaagacttagacatgtcacaagaggatatccaagtggtcaagaaacacaaaatcaggaaaatgcaaataaacaacagagagatgtacacagccaccaaaatgaccaaaaataagagaaaacatcaaatgtgagctgggtgtagagccatgggaactcttagacctgctagttgagggcaaagtggtacaaccactttggaaaactatttgtactatctactatactctcaattctactcctaggtatatagaagtacatgcctgtggaaatgtgaacatatggtcactgagagacatcttctagattaatcattactcttattactcatattatgcttatggtagccaaaaactggaacgtacccaaatgcccaaccatggtagactggatatatgaattgttgtatgtctgcacaaaagaacattgtacatcaagaatgatctggccgggcacggtggctcacacctgtaatcccagcattttgggcagccgaggtgggtggatcacagggtcaggagatcaagaccatcctggctaacacggtgaaaccccatctctattcaaaatacaaaaattagccgggagcggtggcgggcacctgtaatcccaactactcgggagcctgaggcaggagaatcgcttgaacccaggaggcagaggttgcagtgagctgagatcacgccacagcactccagcctgggcaagagcaagatccgtctcggaaaaagaaaaaaaaaaagatctacaactatactcaacaatacggaaaaaaaaaatcacaaacatgatgttgagtaagaaacctagaaacagcctggcgccgtggctcacgcctgtaaccccagcactttgagaggccgaggtgggcggatcacctgaggtcaggagttcaagaccagactcaacacggagaaacccagtctctactaaaaatacaaaattagccaggcatggtggtgcatgcctgtaatctcagctactcgggaggctgagacaggagaattgcttgaacctgagaggcggagtttgcagtgagcctagaacgcgccattgcactccagcctgggcaacaagagcgaaaactccgtctcaaaaaaaaaaaaaaaaaaaaaaaacccaaaacaaaaaaacagctagaaacaaaaataagtacaaaaataaagtacagaagtaggcaaaactaatctatgatgtcacaagtcaggtagggagcatttattggaatcaagcgtggccaggtatattcaatttcttaattgttagtgacaggtgtgtagtttggaaaattcatcacctgaacacttatgatatatccacccttctacaggtatagcacacttcactaaaaagaaggcattacaaacaccagatggttggaaaccaccctctgagaaggctaggcatctcccttaccatctcagcaaaactttcttccggagaaaccccagcacacaaccctggggaagctggcagcgcccaggaagcctgactggtcccagggcatcaggcatcaaaatcactgagagggagttctttcaaatatgtgtaatccggccgggcgcagtggctcacgcctgtaatcccagcactttgggaggccgaggcgggtggatcacctgaggtcagattgagaccagcctggccaacatggtgaaaccccgtctctactaaaaatacaaaaagtagccgggcgtggaggcaggcgcctgtaatcccagctactcaggagcctgaggcaggagaatggcgtgaacccgggaggaggaggttgcagtgagtcgagatcgcaccaggctgggcgacagaatgagactccgtctcaaaatgaaataaataaataaataaaattgtcttcacatatacgggatcatacagcacctgcctggattctcttcaaaaacaaaacttccaaagccaacatgtaaagcctcgcagaagcctgtctcggaataacggacattccttttcctccccatcaggacctttgggaagcgcgcccttcaaatgggaggtgaggaggcaaccatccgaatccaggtcccgcccgcctcccgcgggaatccgaccgcgccgccccggccgcatcccccgcagctccgaagcacctgcggggaaggaggtcaccttccctgggcgctttaaatcatccagtgcttacacctggattccgacatgggaaaagaagtaagatttccctcaaaggcctcccttaagtcctttgactccaccaaacacgaagaaaaatcccggggagtgggggtggggagagtgacattttccgatggaaaccgacgggaaaggtgagacctgcaccccacccgcgccactcgccaccagaggcgtcggagacgccggctccgcggctccagtaaacccaagcgaagtcagctcagccacgggctacctactaaagaccctgaaaggaacagggggcaaaacggggttctgggcagggcgtcaatcacgctgtggggaaaatcccgataaccgtggagcccgcagggagccagggaacccgagtgggcgtggcgcgcggggaggggcgtccgcgcaggaggctggggttctgtgccgtctcccaccgacctcgacctcggcccgggacggccggctgggagcggtcacaacccggggggtgggggagcgcgaaaggccaggaaggtgggagccggttcgggcctggtccggaccccggctcgggctgggagcagcggcgagggccggggccgggggcttcggaggggagctcgggcggggccggggtcccgggtggaaggcctggccggaaaggggcgcccaggagaggcctgagagccggggaccccgggctgcgggaaggcccggccgggcaaggcgacagggccgcgcctcctcaccgtggtcctggttgaagccggcgtagagcagcccgttgccgtgagggttacacggcaggaggttcatggcgccgccgtgctgggtcgccgctcctcagcgctgcatgcctctcgctggggacggcggcctggtcccttcgggccggcgctgaggccgccgcggccggaagtgccggacgtacgtgcgtgcgtgctggatgtgcgtgtgtgctggacgtgcgtgcgtgcgtgctggacgtccgtgcgcgcgcccgcgccccaccagggagcctatggagcgccgagcgcatctaaccgaagcgaggcgagacgaggcgaggcagggcggggaggggcggggcggggcgaggcgaggcgaggcgaggaaaggcggggagaggcagggcgggcggggcgggatgaggcggggagaggcagggcgggcggggcgggatgaggcggggagaggcggagcgaggcggggcggggaggagggggcggggcggggcggggcgaggcgaggaaaggcggggagaggcagggcgggcggggcggggcggaggcggggaggggcggagcgaggcggggcggggaggagggggaggggcggggcggggaggggccaggcgggagcgcagagcacgttcgcgggagggtctggccttgtcatgcgcggggtcgccgcgggaaggaggatggcccgttgagggcttggcacggatacctgacggtcggaggaaggggggagagccggtaaaggaggctgacccaaaactgaggcccggtgcatcatccctcatgagaggcaagcccagaagcgccacaatactagggtcccccttcaggagacagagacccccaggacacagagggcccccaagtcactcagcccccccaggacacgcagctcctgcaggacgcagagggtgcccaagacacacagtccccaggacagagaccccccaggacacagaggacccccaagacacgcagtctccaggacacagaggtccccccaggacacacagtgcccccaggacacagaggtcccccaggacacagcactcccaggacacacagcccccccgggacacagaaacccccccaggacacagcccccctaagacacacagcctcccccagtacacagagtcctttccagggcacatattcccccagaagacacagaggtccccctaagacacacagcccccccaggacacacagaccgccaggtcacagagaccttcccaggacacagggaccttcccaggacacatagccccccagaggacacacagcccccccacgacacagcccatagaggacacaaccccttagtaccccacctaaaggacaggtggccctcacacagcacagcccccgcaggactccgggaccctcaggtcacattgctcacagggcacagttctcaactcttagggtcaggctgctgggggcatcctggtcacagagctttgtccctgggcttggctcatgcagtggatggctgtggaggcctgagtgctggccctcgtgtctcttgcccagggagtcctctccactccccctcctcactttcctgtcccctcctaggctctccctgttccctgcagcacacctgatctcctaggaggtcctgacactgtcccctcgcagccacctgcctccaccccgtctgtcatcctcatcccaccctcgccacttgcctgagctggtgctgacctcttagccatggggaggaaggagctggactgtaagctgagatcactggcccactcgggccaggcggtctccgcatcgtgggcattgaacacctcgattcccatacgagaggggctcctccctgagagcgaccagaagccttccgatggcggagcgagttgggccgccccggctgtgactagggctcgggggcccaggtccaaatcacagagctggggcgagacctaagtgcggtccaggggctcagcaccctcttccctgaagggcactgggttctcctctgtgcacacgtaccggtacctgctgtgagaagtgtcacgtgggggaaggagagaggcgtgggtaagggacatttcccttcatttctctgcttgccacccttggggcctccttcagttcacattttactcagtctcccggtggctgtacagccgggggcgggggcatgtgtggacatccacacacagcgctggttgtatcctaaccaggaaactcaaagcagccttgcccaccacagtgcgttgaatggtgaccctctaaagatgtgtcctggggggctgaggagggaggatggcttgagcccaggagattgaggctgaggctgcactgaactgagattgtgccactacactccagcctgggcaacacagcaagactctgtcgcaaaaaaaaaaaaaaaaaaagataggtccacccagaacctgagaataggggcttctttaggtaaagaatcattgcagaagtaattaaggatctcgagataagatcatcctggatttggggtgggccttaaagctggtgaccggcacccttggaggagacaggaatggaggagatacaggggacagcagccagtgggactggagtgctcagccctaagtcagcaagtgcaggaatcgtggggtcaccaggagccgggagaggcatgaacggttcttccccagagcctcccagcctgggaaggaacacaggctgttgtccaagccaccagcctgtggggctttgttccagcagctccaggaatcccgccgtccactgatagctcagaggtctccacgtggaagacctgaagtgtgacttggagtgagggacacggctcatctcgcccacccttctccaaggcaggcagaaagcagagtctcacctctgggggtggagagaatagaaattatacacacacacacacacacacacgcatatatatgtatttatatatatatgtatatatctcctgggctcaggagatcctcccacctcagcctcctgagtagctgcaactacaggtacacaccactatgccagcttaattttttgtatttttagtggagacagggtttcatcatgttgcccaggctggtcttgaactcctaggctcaaaggatatgcctgcctcagcctcccaaagtgctgggattacaggcgtgagccgctgtacctggcctaacgatgtattgtttaaagatacaacatatttggacacacataaacatataaagaaaaccaggaggatggtttgcacagaattggagatggtggttaccgctcggggcaagagaagaatctacagtaggccgggcgcggtggctcactcctgtaatcccagcactttgggaggccaaggcgggctgattgcctgaggtcagcagtttgagaccagcctggctaacacagtgaaaccccatctctactaaaaatagaaaaattatctgggcgtggtggcaggctcctgtagtctcagttactcgggaggctgagccaggagaatcgcttgaacccgggaggcggaggctgcagtgagctgagatcgcaccaccgcactccagcctgggtgacaagagcgagactgtctcaacaacaacaaaaaaagaatctgcaacaggggaagggtgtgtggttgaccctgaagaacagcccccaacgacacccccatccccgtgctcagagcttgtgcatgtgttgctgtatatggcagcagggactttgcagatgtgactacctcaaggaccttgagatggggaggttaacctggatgatccaggcggaatcacgagggtccttacaggaaagagggaagggggtcgctgagagagagggctgtagtgtgaccacagaggcagactggagggacgcagccgggagcccaggaatgctgctgtctagaggctcaggaggccggagattgactctccctggagattccagaagggaccagccctacagacacctttattttagcccattcctccagaactgtaagaaaataaatgtgtgttccttgaagtcactaactttgtgatagtttgtattagactgaagaatggccctcaaagataccagattgtcatctctggaacctttaaatgtgttattcctggctgggcacagtgactcacacctgtaatcccagcactttgggaggctggggtgggtggatcatgaggtcaggagttcaagaccagcctgaccaacatggcaaaaacctgtctctgctaaaaatacaaaaattagccgggcgtggtggcagacggacacctgtaatcccagctacttgggaggctaaggcaggagaatcgcttgaacccggaaggcagaggttgcagtgagcagagatcgggccattgcactccagcctcggcgagagacagactccgtctcaaaaaaaaaaattaataaataaagaaggtattctcttactttggaaaaagggtctctgcagatttgataaagaggccctgagacaggaagactgtcccgaattgtctggatgtccccaagtgccatcacatgcttcttcaggcagaggaaggattgaccaacagaaaacaccacatggggacggagacggagactgcagtgatgtggccacaggccaaggaatgcccggggcccccagaagctggaagaggccggaaggaccctgccagagcctccagagggtaccacgccttgatctcagcccagtgatgctgattttggacttggactccagaacagtgacggaacacacttctgttgtttcaggcccccgggctgtggtagtttattacagcaacagtaacagaccttgaaacccgcgccgagggcttggcaggtaagactctactccttctgcttcagctgctgtgtgttgggcacacaggtgttgatattcgtagcagtactactgttcattcaaacagacacacatgaactgttacatgaaggatccatttcacaaatagaaccattagaggaccttttaagaaacccatctcccttatcccctttctgtagtggaacgtggagcaatgttaagattgctggacactctggaacctttaatcctcacgcctggaatcccagcactttgggaggctgaggtgggaggatcacttgagcccaggagtttgagaccagcctgggcaacttatgaagaccctgttgccaaaaaaaaaaaaaaaaaaaaaaaaagccaggtgtgatggtgcacacctgcagtcagctactccggagggcgaggtgggaggaccactgagcccaggattcaaggctgcagtgagctgtgattgtgccgctgcactccagcctgagcaacagagtgagaccctgtctctaaaagaaagaaaggaaaacattcaaggcaaggaatcaagaaaccagcagatggtggcgattggctttgagcaacacacagagtcttcctccagctgaactggaaggtcagcgtctgcccggtcaaaggcatggagaccggtatgcctgcctctcaccgtggcccacacggcgatcttcctgtcacctcaaagggcaccaaggaagagcaaggcagcccctgggcaccagcgaggctctggaaggctcctgttggacctggccccacggacaaggccgccctgtgacgagggggcaggacaagaaagagcaaggcagcccctgagcatgcacagcgaggccctgggaggctcctgttggacctggccctgcggacaaggccgccctgtgacgagggggcaggacaagagcagggtcccctctgcacacaggtgggagcagtgcccacctccccgacgaccaacactccccatcctgccggatgtgagtgactgccactttttaccaatgacgccttgcaccttgctgcacttttctcaccttctagataagaattattaagatagtaagtcccggagtcacccctgcttcctgacagcatcgaacagggtgcagcggttgccgtgaatattccctaaaacctccacaaggctgcccaaatcccgcccatcctccctgactccccagcaccctctcgatggtcggaggcttggtgctgcagcaagtcaggggcgttcacggtggcctttggctaacagccttgacagcacctctgggctgctgggaagtagccggtcacctcacctagaagagggtgaaggctggagcaacagaactgctttgggactaggtggagtttggaatccctctccacagtggctcagggcctctgtgctccagcggggtttgctgtcatcatgggaatgtagaggagaaaaaccagtatcagctcgagttcagcactgcggcagggtagggacagtggttttatttttatttgagatggagcctcactctgtcactcaggctggagtgcagtggtgcaatctcagctgactgcaacctccacctcccaggtccaagcaattttcatgcctcagcctccttagtagctgggactatagacgtgcaccaccatgcccggctagtggtttgtatttttagtagagacggggtttcatcatgttgcccaggctggtcttgaactcctaagctcaggcaatccgcctgcctcagcctcccaaagtgttaggattacagacatgagccaccgcgccctgccaggacagtggttttaaaaggcaggtgccagcctttcttaagagaagaaagtgtgtaagaatctgtagatctaaagcaacaggccacacctctgaacatgacaagaaaatgacaaagtttctctaaggtttaatttatatttatgttttttgtatattcaccacccaaacacacagtcttctacttagtccggtctgtattaggtttcgtctgtttttgttctgccttggtttgctgtagcactttctgccgtgagcgtaactcacttccttgtaggagtttcctgaggctgccgtaacaatcgccacaaacctggtgacttaaataacaaatatttattttctcgtagctctggaagccggaagtccaaaaccaataacttggcagggctgtgctccctctgggagatctcggggagcctccttgctacatgttccgcttctggggacttctggtggtgtttccctggagggccaaggcctccgggcggcccgtgcattcggtgaacacctccaaagagctctgagtcacaaagccttgggaaactttattttattctttctaggacattatcagtagtcccgaggagacatcaattacaaaacaagaaaaaggaaggaagagaaaaatacaggtttggcctggtttaatgttgcaatgggaggatccatttccttacccttcaccatcagcgagctgggaacggagggagaagaggcccctcaacgtgggtttcttcaacgtggactctcctttctgtgcatctcagtgtccttgtgtttgcagctgggaggtcggccctgtcgttctcaccccacctgtggcacagcagagagaagggtgcacaggtctttgcagcgtgcctgcacgaggctggccaccctctccagacactgtcccctcagggttcaccttctgcccacagaccacacccctgcctccccgtggactttgtccccgtggctgccgtgcccaggtggccagacacccccaagcctgggtccacccgcagggaccagtgctcctctctcctgtctgggcctcggttccaccatctctgaatacaggctttgcccctgattctagggtcccttaaatttcttttttttttttttttttagatggagtttcacttgtcgcccaggctggggtgcagtggtacgatctcggctcactgcaacccctgcctcccaggttcaagtgattctcctgcttcagcctcctgagtagctgggattacaggtgtgcgctgccatgccaagccaatttttgtaattttattagagacggggtttcatcacgttggccagactggtcttgaactcctgacctctgatccggctgcctcggcctcctgaagtgctgggattacaggtgtgagccatcacacccagctgggtcccttaagtttctaagaatctacagatcatcagcaggaactaggaacatctgggtattttctcgcttcgtttttttggtttagtccctcatttgcgacccccagccacagagaaacgttcaacagtgtgaccagggaagagagcggccctggaggtctttgcggtcagccctgctctgaggcagtcggggtcaggggctacatcttcatgcggaattcctgacagcccctcggagctcctcaccgaggctcaggagcacggctctgatttctcagacaggcacatgcctgggtgccagcttttaactctccgctctctcctcctctgcacttctgttccggaaaaggaatcctttctcaacaggcgacaacagttcaaggattcagccttgttgccagtgtcgtgtattagctccgatatgtgatgtctacaccaggcagtggcgcagtgaagtaaagggctataagaaatacacaaaatctggccgggcgcagtggctcacgcctgtaatcccagcactttgggaggccaaggtgggtggatcacctgaggttaggagttcaacaccagcctgaccaacatggtgaaaccccatctctactaaaaatacaaaaattagccgggcgtggtggtgcacctctgtaatcccagctactcgggaggctgaggcaggagaatcgcttgaacccgggaggcggaggttgtggtgagcccagatcgtgccattgtactccaccctgggcaacaagagcgaaactctgtctcaaaaataaataaataaataaatacaaaattcgaaagaaccggtcgccaactctaccaagagagaaacaactatacattttattgttgagaaacattttcctaaataagtgttttcacttcattctttactgaaacagctcttccttgacatgtcgaaactgtgctggctgtgttcaacataactagaggtatctttggcattttcttcccttagcttcataacttgtagaatatcttgtacaaaaaactgtagatttacagaaaaatatgcatataaatcacttattaatcccaaaatgtagtaaataactagcaaaaactttatcaaatccatttcatacacaaactggacagatcagttgcacataacctctacatctgcagcgttttataaattggcgctttgacattgaaaaggaggtttacaaaaagacccctctcgtaatatcagtgactctaaattatcccgctgccattgcttctcaaattccattgaatttatactaatcactccaatatcaccgttcttacaaaagcagttattttaaggaaaaagttgcagtgcaatcatgataaagtaacattcagaatttcatgttaccaagagtcgagcagagtactaattttccctttacaaacacacatcgaaaacaagagcttcatgcacatccacgtagaaattcgaagtccgacggggtagtgtgtttccatcacacggaaggcgtcgcacacattcgcaagcagcattcgccgagaggaaccgggatctgagatgcatccaccagctgccgggggtaacgccgagcttctcctggagagattccgccgtgtttctttcagtgccttccttaagaaattttgcagctgtttctggtgcagtttttgggggggctctggggggggcggacgagcttcactttgcggaggctgctccttttgtgggtggagctggtggtgagggagtaggaaccgccgtgcatcatcctggcattcaggccgttggccatcgagaaggacttgaggtggcttcttaaggcaatggggagcgggagcttgtccaccaggtgcaccggcgtgcaggacacgaccgcccggcagcagaggtcttgcaagctcagcacttgggagagaaaagataaaccttgcttagtggatgtccccacctgggctgggaatgaggggtggtgcccacacctgttctcccgccctcccaaggctcggacgcccgtggccctggcttgtacatgcagcaagccctgccgcgacgtcccctctgcccacgtacagatcccaggagctccctcatgagctttctgacaaagctgtagtcattacttctctcaaatgccttgctctgagaacggacacagtggccttgagacgggtcccgggaggcagacacttatccagggggccgctgacccacctcggcatctggagggcagaggtggcccccggaatagcccctgggcctacccttgctcggccgccagagccggtccatcccatgccgcagcagcacgatcctggccagctccgtgaacgactctgtgatgttgaaattgcacagagggctgacctcaaagaaggtcacgcccaggcgctcggcgtaggcctgggcctgctccgtgggcacctgccgcttgaacgccaggtgcaggcggttccccaccaggatcttggggactccgggggcatgctagcgggcaggagaaaggcgaggagcatgggttacttcagtgagattttgttgtcgtcgtaatgtgggtgctctgggtcgaggaaccccccacgagttcatgtccacccagaacctcagcatgggacctcgtttggaaagaccgtctttgcagacgtaaatagttacggtgcggccgcactgaattagggccctcatctaatgactggtgtccttgggagaagagaagacacagacactcggaggaggccatgttacgcgaaggcagaggctggagcggtgcagccacaagccagggagggcccagggttgctggcaccgccgagagctgggagaggcggctgtagggaagtggccctgccgacaccttggttttgggctctggcctccagaaccgtgagagaatgcatttctgttgttcaggacgcccaggttgtggtcgtcggttctagcagccccgggacactcatacagtgggcttagtgtcgaccacgccatgtcaccattgccaggcgggctggtctgcgtgccagcaggcacaagcgccggtcactgctggtcagcccagcccgaccacagcagggagtgaagcaggccaaacctgaccccacgcatagccgaggtacgccgtggacgctcgtttcgtctggaccagcttcctgagctttcgtgattgtagctatcaccaaagccctatccagtgttgtgccgaggtgaggcaccctccttcctgctggagcgccatccggtgccctggcctgtgatccatgggtacccatgagccctggagggcccggccctaattcctggcctgacgtcctcccaagcctacagggatcttgggcagtggcatttctacaacatacctcatcgatctccttaatccatcgatcaatgccgtcaaaagaccagcggttcgcaatgtcatagaccaggatcacaccctgggggagaggtcacaggctcagcacgcagaacacagatgcaggcacagctgtggccatgcacgcaaagacatacaactaaataaccactttccttattttaacacaaagtacataattttgatttatcaactgaatgtagcagttttatgatcattttcagtgatatttcataagctcagtgataaaccctcaaatgtcacggtgatctggggactagaactcacacccacgagccactccaggaacacaggatgcaggggcaccgcagtaatcgccacctctcgaggagtgtggcccactcacctggatggattgcacgcatacacgtgcacatacacatggagctcacgcacacacaggcacttgtgcacagatgcacgcacacacagtgcacgtacctgcacacatgttgcatacacacacgcaggcactcatgcacagacacagtgcacatacctgcacacgtgtacacacgtgtactcatgcacagacgcacacagtgcatacctgcacacatgttgcatacacatacacataggcactcatgcacagatgcacacacagtgcacacacgcagttcatgtgtgcacatgcatgcacataaacaggcaagcacacacgtacacattacacacacaagcaggcactcatgcacagactcatacacagggcacgtacctgcacgcacgtgtacacacacacacgcacaggcactcatgcacagatgcacgcatacacagggcatgtaccttcacacacgtgtaaacacacgcacaggcactcatgcagatgcacgcatacacagtgcaagtacctgcacacgtgtacacatacacgcacatgcaggcactcatgcacagatgcatacacagtgcacatacctacacacacgtgtacacacacacacgcacaggcactcatgcccagatgcacacatacactgcacatacctgcacacacgtgcacacacacacgcacaggcactcatgcagacgtatgcacagtgcacgtacctgcacacacatgtacacacacacacacacacaggcactcatgcacagatgcacgcatacacagtgcacgtacctgcacacacgtgtacatgcacacacagtcccgtaaatgcacgcttacatccgtaatactgatgaagtctttcaaacaaccaaccactctacagcacgtttttagactctcagcaccaatttatacgtaagcttaaccgccttgtcctccaatcatccattaaaggatggtaagttaagcattgtaaatgttattattcaaagttggtttgatctcccagctcgggggatgctgtgttacctgtgcgccccgggagtaggagcggaatatggtacaaaatcttccctggcctgaagtatccctggaaaagatgttggagaccattaagaagaaaccagtgcttcttcctgacaacaggttctggaacttcagagccacagcaagtgcaccacacacccgccagtcagcagccaccacgccgccagcgtgagaccccaacaaaactttccaatgtccctgaagggatccgggtgttgggatgtcctcccaggctcatgctcttctctgtcatttaaaaagtcaaactagaaaaaatagtgacggttttaacataattctcagatatttaaatacattcaatgtaggctttaaaaaacttgttgaatctgaagataaatctatgcagtaaggagtgtgggtctacaccaggggagagaggccggtgggatccctgctcttccagttcaactgtaagagctcacatggagtcagcccttccagtgtgcccctaagaggggagggatacagggaactgcctggcgtgagctgcaggcagggcttgagttctcagatgacggcacacgcagcaggtactgggacccacaaagaccagaacggagctccaagaaacaaatgaaaggccgggcttggcggctcacaccgataatcccagcgctttgggagaccgaggcaggcggatcacccgaggtcaggagttggagaccagcctggccaacatagtgaaaccccgtctctactaaaaatacaaaaattagctggacatggtggtgtgctcctgtagtcccagctactcggaaggctgaggcaggagaattgtttgagcccggcaggcggaggttgcagtgagctgatatcgtgccactgcactccagcctgggagacagagtgagactctgtctcagaaaaaaaaaaaaaaaaaaaaaggaagaaacaaatgagggtggaaagggtgctccccagggatcagttcccagaggaggcggccctgggacagccagcgctgtttcccggagtctgcacatgcaacgaacacacctacatcaatgggagattccccagtgggccaggggctggccccgcacacgagacacaacctcacggatgagcggtgggacgcggcatggttttgctgtttgtgtcacatgcacctgtggtcggtgaccaccctcagcacgagagagaagggcctggggctccagaggggaccagcgacactggccattgccaaagcctaggagtgagtgcctcatttcctgagaagcaaattgatctagaattcaagcctcagcaggacctcaggtgctcaggctttgcacacagcgggagctgcccaaaagctatggtcgaggaggcagcgggccaggtcaatctgccagcttcgcagggaggccgaagggccagcacgtgctgtcagagtgccccatcgtgaagtgggagcactccctcctcagctgggacaacgtgccggcctcctgggccgctgccaccctgaaggagcagagcagagcccaaccccagccccagtgggtgtggggagggaggtgagggcaggtgggggcaggcagaagacccagttgtgggcaccaggaaggaccacactctggggtccacactccggggtccacggtgggagtgtgaccttgctcagacgacagtgtggacagagctggcaccggcaccacaggagagcagcctcagggtcctgctggggcctggggggattctgagcttggcagaagccccctgggatctcactcctgaggtgagagggagaaaagtgtgagggtgactgttcggcccactgggcagctggggtcagggaggcgttcgctaaggtgagcagccagacccggggtggagctgggagagggcacgcgccagccctgatgcaagcagatctttaggaaggcactgagctcaggggcaggcgtggggccgagtgcggcctttgggtggccttggcccctcaggaaggagtggtctcggggagggagggagagacttgagaacaaggtcctggacctgcagggctcagggccaggaggaggcagcaaaggcccagctggcggagggtggggagcaggacaggggctgacggcaaccccaacgccagcccagcgagggcatggccccgggggagtggggacctgagagcagactgggcgggaggcctgaagctgtgcagcaggaagggtcggggcgcttggggacactgtggagacaggctccccaggactggccactactagacggggcaggcgtaggaaggggacaggtaagagaagggggtcccagctgctggaggcacacgtggctcgggggtggcccagcaggcaggaagggccaggaggctcaggcgagggtcacccaggagtggcagcagtgcaggagggatgcccaagagggaggcagccccaggatgaggcaccgcaggagccccccatccccaccgccccagagctggaaccgcaggagctccccccatcccaagccaagagcgggtggagggagaggtgttccaagctggccccaaggtgggggtgctgggggagggagaggtgccccgggcttgccccaaggtgaggagctggggttctcacagctgagagagcagagccagcagccccaggctggccagcaagtcctcacctccccacgtctgggtcctccacccgcaggcccgaccacagccccgctggcaccaggacgctccgagctccctgccgggtgctcagtggcatcactgagccaggcgtgggggacccaggagccccgggctgcctcaaccacgctgcatcggtcccctcttggcatcttcccacagacaccaggccacaggttctgatcccaaaagccgattcccagccacagcgctatgtccgttctggggtcccctactctggatgacgggggcccagacaaccggaccaccacctccttcagagaagccctggtgcagctggggctgggggtgctccccggggcgctgtgccgacggtggtggtgggagggtgttcccgggggcgctgtgccaacggtggtgggggaagggtgttcccgggggtgctgtgccgacggtggtggggggagggtgctccccggggtgctgtgccgatgttggtggggggagggtgctccctggggtgctgtgccgatggtggtggtgggagggtgttccccgggggcgctgtgccgacggtggtgggggaagggtgctccctggggtgctgggcagatggtggtggggggagcttgctccctggggtgctgggccgatggtggtggggggagggtgctccccggggtgctgtgctgatggtggtggggctggtggtgctccccggggtgctgtgccgacggtggtggtgggagggtgttcccgggggcgctgtgccgatggtggtgggggatgggtgctccccggggcactgtgctgacagggggtgctatgccagccaggggggttactccctgggggtgcgggacgctcgcacctcctccagactcaccagagctgcagcttcacccgccgcccgtccagcaggatggtggtcgtcttgtagtcgatgcctgcggaagggttagagacggcttaggcctgaggctgcagctaacaggacgctggaagtctcacgttcagggaagaaaagggtttctcatcagtgcaacttccaggtttacaaggcaggcggatgggaccccctccctgtgtctgcccaagctcacaggggccctgcctgcgccctcccgcacccgggcccctcctgtcctcagccgccttggcctctgtgggggtcaggctcgcatcaccctggcccagggggctccccgacaggcactgcagggcctacatgtgacctggaggccggtgggtttgccgcggggctgtggccgctgggtgtgcccccgtctgggctggtccttccctccccacctcctccccaagcctgcaggcctgagagctccgactcagctctgtttccaagggaacggggctaaggcagcggctctgcagacactgagactgcgtcccccagtatcacactaggaaagtacagtaaagacagacgtgacgctgcgtgggatgcccgctctcagctgtgtacatgtgcatgtgaaccacgcatgtgcagggacacgggactgcacacccgtcccagccacctctggggtgcagattacaggtaggctggaaccttctttccacatttctattttttcaagttaaaaacaaacaaacaaaaaaaaaacccgagaatgcctttcttcttcttttttttttttgagacagagtttctctctgtcgccctggctggagtgcagtggcgtgatcacagctcactgcagcctccacagcccaggctcaagtgatcctcccacctcagtcccctgagtagccgggactacgggcatgtgccactagggccagataatttttgtatttttttgtagagacggggtttcgctatgtttcccaggctggtctcaaacgcctaagttcacacaatctgcccggctcagcctcccaaagtgctggcattacaggcataagccaccatgctggaacacttcttctaaaataaaaagctacaattaagggctggatgcggtggctgacgcctgtcatcccagcactttgggaggctgaggcgggtggatcacttgaggtcaggaattcaagaccagcctgaccaatatgatgaaaccccatctctactaaaaattcaaaaattagccgggtgtggtggcgggctcctggaatcctagctagtagggaggctgaggcaggagaattgcttgaacccgggaggcggaggttgcagtgaactgagattgtgccactgtgctccagcctgggcgacagagggagactctgtatcaaaacaaacaacaagaacaacaacaaaaaaaaaaaaaaaaaaaaaaaactacacttaaaaaaaatcttttttgagacagggtctccccctcgcccaggctctagtacagtagcacaatcacagctgactgcagcctctacctcctgggctcataggcacaccactgcacctgccaccacacctgccaccgcacctgccaccgcacctgccaccacacctgccaccgcacctgccaccacacctgccaccgcacctggctaattgacagggcattgctgtgttgcccaggctggtcaacctcctggactcaagtgatcctcccacttcagcctcccaaagtgctgggattacaggcatgaaccaccatgcctggccacaatacattttttttttttgagatggaatttcgctcttgttgcccaggctggagtgcagtggtgcaatcttggctcactgcaacctcggcctcctgagttcaagtgattctcctgcctcagcctcctgagtagctggaattacaggcatacaccgccacgtccagctaatttttgtatttttagtagagatggggtttcatcatatcagtcaggctggtcttgaactcctgacttcaggtgatccacttgtctcggcctcccaaagtgctgggattacaggcatgagctgctgctcccggccaataaatatttttaaagggaaaaatatgtttccccgcccccatcaccccccagacaccagtgttctgcttctttaggaaacatctcctgtgttcacttctagcgcttccggatgagcaccaggtctgtcattgagaacatggaaagagagggtttgagttaaggggctggagaatgccgggtaggagcactgccttcctaaaaccaggtacaatgacacgtacaatcacaggaacccaaactgcttagtaacaagacatgaccagcctttgtgggatttgcttgatttatttcatgtataggatttacttgacagtatctctcaaagcactaaacctacaagagacaagccctggcctcactctcggctgtgatcggatgttgagtgctttgacaagtatggctgaatagggaatcagaattctaaagggaagcgcgccgctgagaggccgaggggagaagcagcgccgaggctcgcaccagacctcaccctggagaccgtcgtggagcacacggcctctgcagctctccttccagagaagcccacgatgtagccagtgagtgcccagaaacaggctcctctaaaaatgcgaggctgcggaggccacggttctcaagcagcttctgccccctcgaagggtctagaacccttggacttggccacaagcccccctgcatcccaggaggcagtgtgccgagttcctggtctcctgtcgggcagagcgaggtgtgcagtggcggtgccaccggtggcctcccacttggcttggacagctggtcgcccacatcttcaggcaggcctgggcgttgcagcagctctgggcctctgtcctccactttccactgatgcagccatgagcacgtgcatggcacacctgcctgatctgagcacacctgtgcagcgccttccatgagatcccgagcacccctccctcccacagctgctgtgtccagcctgtcccctgccctctgcttcctcctccgggccctgcccccttcctggactccagaggctctttctgtggtgccaccagagccccagagacatggagtccaggcttcccgcatcctcctctgtctcctgctaaactccacactctgtccacagagactgcccatcacgccaccaggtagattagaccaagcaacaccagagcaaactccccccgtcagaggagagtgattcagaggacaaaagatacagcagcactgagaacgcccgaagcacccgctttgcagacgccacctgccccgtgatgaggctcagacagagcggccaagcagtcccctgacccacccagtacgaggctttcctgagctggccaaacgtttgccaccgagcccagcaggcacgctgagtgcaccgtctgtctctctcttcttggcatgggcgctgacggggcactgatggggcctttgggatgttgctcttccggctggaaacctctgtggctgctgaattattgtcctgcatccaggaagaatgaggtacccagacaagtggagggtgagcgagacgaggaggagctttactgagtgttagaacagctcaggggagacccacagtgggtggcttctctctgcaggcaggtcgtcctgacaagtgttcagctctcagcagacagggtagctctccgcagctggtcatcccgacgtccgcgttgctctgagtctggggtttttgtggtcttcagggtggggaagtgcacgctgattggtccacaggcagcccaccccaaccagcatgcacatcccccctctgacaaaagcaccgagtcctccttccagtctgcaggactggcagcccgggccccaggcccccttgaagcttcaaggtgtggcttcaccagggacctgcccccttccacccagaagtctgtctgcctcccactgctgttcatggcacccagcttgttcatgccaaggggcgcctgcaggccagcactgagccaccctcagccctccctcagcttccctcccatgttcaacagcgcccagtcccgagggggctgaggtggcaagggctggtgtgtccgtgctgccccaagtgtggacccacccggatggtctgcagcagcacctgggctcagccccaactgtgctccacgactggagcgggcgtggggagtgaggagaggccaggcatttggagcaggcacttctaagcctgcagggggcaggggtggccttcccaggcctccaagagcacagagacgcccgcgtctagagctgccccagggcagcgggccgcggcacgcagggaaggcggagctgctgcctgatccgtggatcgagaggcccagccatgcctccgctgcagccggcatcttggcagcagccactctagatgggccactgctaccatcagcatcttagcaccaggagcttgacctcaccacagtggggcacgcggcgtagcctccattgctgtcagaccaaaaccacactgctgtggttttcccaggtgaccaagtgagtatcaaggaaacagtccttttacagaaaggaaaatagccaggcacggtggctcacgcctgtaatcccagttctttgggaggttaaggtgagaggatcgcttgagcccaggaattcgaaaccagcctgggcaacatggtgagacctcatctctacaaaaaatttaaaaattagggcctgggcgcggtggctcacgcctgtaatcccagcactttgggaggccgagcggggtggatcacctgaggtcaggagttcgagagcagcctgaccaacatggagaaaccttgtctctgctaaaaatacgaaattagccgggcgtggtggcgggtgcctgtaatcccagctactcaggaggctgaggcaggagaattgcttgaacctgggaggtggaggttgtggtgagccgagatcacaccatttcactccagcctgggcaacaagagcgaaactctgtctcaaaaaaataaaaataaaaaataaaaaaattggccaatcatggtggtgcacacctgtcgtcccagcttctcaggaggctgaggtggaaggatctcttgaacccgggagttggagactgcagtcaactatgatcgtgccactgcactccagcctgggtgacagagtgagactctgtctctaaaaaaaaatgtaaaaggagacaaaaacacttttctggagccttccaactagatagttctactagccccagcgcgggagcttcaggccctgtgaaattacgctttgagcgacgaccaaaaatctcttcacagtcctttaaaaccctactaagctctcgggaaggcaccatcatgtgccaagtcctgcagccgtcagcaatgaacacactgagcgtgaaacacaaacaataaattaaaaaagaacatacatatttgctccataatagcaatcctcaaagagaattttggaaatatttattttcccttggcaggcacgaggcaatgaacgaatacacttgggaatctattttcgaatgcggagataactccagctttgatatgtctgtctccagacgaagggacactcacccccacgggctgagaggctcatatttgtctttccggagattaatccactgcctgagcttggctgggtcctctgacttagaaagtatcctcttgacctgtccttgagggccaacaatctttttttttttttttttttttttttgagacagagtctcgctctctcacccagcctggagtgcagtgacgtgatctcgctcactgcaacctccgcccaccgggttcaagcaattctcgtgcctcagcgtcccgtgtagctggaattacaggcacacgccagcaagccaagctaatttgtgtacttttagtagacacggggttttaccatgttatccaggttggttgcgaactcctgacctcaggtaatccacctgccttggcctcccaaagtgctaggattataggcatgagccaccacgcccagccaagggccaaacaactttaaaatgtgttcataaatgtaaaagaattcctgattttttttttttttttttgagacggagtcttactctgtcgcccaggctggagtgcagtggcgcgatctcagctcattgtaacctccgcctcccgggttcaagggattctcctgtctcagcctcctgagtagctgggattataggcgcccaccaccacgcccggctcatttttgtatttttagtagagactgggttttaccatattggccaggctggtctccaactcctgaccttgtaatctgcacgccttggcctcccaaaatgctgggattacaggtgtgaggtaccgcgcccggcttcctgatggtctttttaagcgccctacgagtttcaaaaccatctttcgtttctgttttcatggagtcatggatgctcacagtctgaagtgctgtcacgatccacgatgttggaccctggcccacccgaacccctgtctcccttccccattttaatcctttaaaataacttcttttgctatgcatctccagattgatgaagaacatacttacattcctacttcctgacatttcagttttaggcatccactgactttccactacagaagatgaaaatgtagctctcggtcactgacacaccccacccctgtaactccaacacacacagtcacacacatcctgtactcactgacacaccccacccccgtaactctaacacacactcacacgctccctgtactcactgacacaccccaaccctgtaaccctaacacacacagtcacacatcctgtactcactgacacacttcaccccgtaactctaacacactcacacgctctctgtactgacacacctcacccctgtaactctaacacacacactctcacacacatcctgtactcactgacacacttcaccctgtaactctaacacacacacgctccctgtactaactgacacaccccacccctgtaactctaacacacactcacatgctccctgtactcactgacacaccccacccctgtaactctaacacacacactcacacgctccctgtactcactgacacaccccacccctgtaactctaacacacactcacatgctccctgtacccactgacacagctcaccccgtaactctaacacacacactcacaccctgtactcactgacacaccccaccccgtcactctaaaacacacacactcacacaccctgtacccactgacacaccccacccctgtaactctaacacacactcacatgctccctgtacccactgacacagctcaccccgtaactctaacacacacactcacaccctgtactcactgacacaccccaccccgtcactctaaaacacacacactcacacaccctgtacccactgacacaccccacccctgtaactctaacacacactcacatgctccctgtacccactgacacagctcaccctgtaactctaacacacacactcacccactgacacagctcacccctgtaactctaacacacacacacgctccctgtactcactgacacaccccacccctgtaactctaacacacacacatgctccctgtactcactgacacaccccacccctgtaactctaacacacacactcacacgctccctgtacccactgacacagctcacccctgtaactctaacacacactcacatgctccctgtactcactgacacaccccacccctgtaactctaacacacacactcacacgctccctgtactcactgacacaccccaccccgtaactctaacacacaaactcacacgctccctgtactgacacaccccacccctgtaactctaacacacacactcacacgctccctgtacccactgacacacctcacccctgtaactctaacacacacactcacacgctccctgtacagttttgttgctttttaagctagatggatattccattctacactgtcataaccaggtgctatggtttgaatgtgtccgctaaacttcacgttagaaaggtaaacctccagtttgtatgttgattggaggtggggcctttgccaagtaattaggattaggtagggtcagcagggtggggccctgatgatggtactggtggccttacaaggagaggaagacacctgagctgacgggcttgcgcgatgccctctgccaggttatgacgcagcaggaggccctccccagatgcagcccctcaaccttggacttcccagcctccagaactgtaagaaatgcatttattttctttataaattacccagtttgtggtattctgttacagcaacagaaaatgacaccaggtagacgccatccacagctgaaccaccatatggtatacaatgtttatttttccttcatgtacgaatttttgtttctactggagttaaaaattgcctcattgtaccaggcgtgatggttcatgcctgtaatcccagcactttgggaggtcaaggcaggtggatcatctgaggtcaggagtttgagagcagcctgaccaacatggtgaaacctcatctctactaaaaatacaaaaactagccaggcatggtggtgggcgcctgtagtcccagatacttgggaggctgaggcaggagaatcgcttgaacccggcaggcggaggttgcagtgagctgagatcgtgcaactgcactccagcctgggtgatggagtgagactcttgtctcaaaaaaaaaattgcctcatgtttacttgttgtttactcattgtttacttgttcagttttctctgcatttattactaattcatcactgtaattttccccaactatctaaatctgctctcggtacctgcaaacattcaggaatttcactttctttggggcatctttccagaccttctgtcctgctcccatctggactgggaggactgttgccctggggcccccactcccttactgctggattccatccttccctctcttaagctgactcctcttttcaattcctgagaaaggtgcatggaagaaggtagtatctgagactttgcacgtctgaaaatgtctttaggctgccctcactcttccttgtgtttggacaggcatacaattgagggagaagatgcttttcccttaaacacgttcagtcattccagagttccttttgagatcggccgtaaactcattcttgaccctctgaatgcaacctggttttcctcctggtgggcatggaggcgcttctctgaaactgcacaccttgtgggccttgctgtagggatcttcgtggccaggctgaccactccatgggcctttcaatctggagacacaaatctcaattttggggaactttcttggataatttgttctctccttctgggatgtgattaatcagatactgggcctcctgagcctgtttcccacctttcttgtctgattttgcatctctctctctttttcccagcattctgggaattcatctcattttaacttttatcccttctttgaaattattgttttcaatgtccaagatctttcttattttgtgactatcaacactggacaaactagaaaacgcaacaacctggccaggcgcggtggctcgcgcctgtaatcccagcactttgggaggccgaggcgggcggatcacctgaggtcaggagtttgagaccagcctggccaacatggtcaaagcccaactctactaaaaatacaaaattagccgggtgtggtggcgggtgcctgtaatcccagccactcaggaggctgaggcaggagagtcactgaggctgggaggcggaggttgcagtgagccaagatcgcgccattgcactccagcctgggcaaaaaagagtgaaactccgtctcaaaagaaaagaccaggcgtggtggttcacgcctgtaaccccagcactttgggaggccaaggtgggcggatcatgaggtcaggagttcgagaccatcctggctaacagggtgaaaccccgtctctagtaaaaatacaaaaaaaaaaaaaattagccgggtgtggtggcgggcacctgtagtcccagctactcgggaggctgaggcaggagaatggcgtgaacccaggaggcggagcttgcagtgagccgagatcgcgccactgcactccagcctgggcgacagagcaagactcgtcttaaaaaaaaaaaaaaagaaaagaaaagaaaagaaaaagcaacctaaaacacctggggaatgactgactgaacgggggaggggcctccttgtcacctgcgtcactctggcatcgcaggcaacgttcgtatggtttggagttgctgccggccagcttcctcaccaggtgggaagaacgaaccccagaatgaacctaacacagaagaaagcagggccagggtgtgtgcagggagtaggcagaggagaaagaacaacacgagataatcctgacggcatcgttcaggcaccagaatccagccacgcctgaaactacaccagcccctcaacctgccggctgtgtggggcaccacattcctctgtgctgaagctattttgagttaattttcttgtttgcaccaaaatgtctggtagaaaacccacaaagcacaatgactggagagagagagagaaaacatctgacaccccctaaactgggaaaagctacaaaggatgcattttcacatcttccccaagcaaagtacaatgacctccacatcccggaatttcactaacaataaacaagaactggaaataaaatcgaactcagtgataatgatttcattattcaccatcatgaccaaaactggactcagtgtcttcttcagctggcagttcccattagcacagcccggatgcataacccacacccacaacctgccctggcaaatgaccagctttgaaaggacaatgacagccgcctgtctgacgtggtctccaccaagcgctggcttccttcacagcagcacttggcccttctcccgaatctattctgctcccgtggatggcactccctttaccccatacttcagaactgggggtggggcagggtagggtagtaccttagccagtggggttgctataatgaaaataccataagctaggcagctcctaaacaacagaaacttgtcatcacagttctggaggctggaagttctagatcaaggtccaggcagagccagtgtctgacgagggctgcatcctggttcatggaggtgtcttctccccatgtcctcccctagctggaggggcgagggagctcttggatgcttcactcatcccatccacaaagccccacgtgacctaatcatcttccaatagccccatcttctaacaccatcaccttggggttaggtttcagcacccgaatttgggggggtcacaaacattcactctcttgcaggcgggtggggagataaaaccttaaaaaacagtgccctccatctgctacgtgggtccttctcaccaggggggagaggtggcaacagtgacgacctgaagcccctggtactctgagtctcctggtacgggacggtgaggaccccacagggctggtaaagcacagacgctgcagcctggggcctgggatcaaatccagtcccaacaccaatgtcttcgtccatctcccccgggtctccgtttccctggctatgaatggggaaccgaccgcctcgtgggacgcactcaccacagctcctcaaaatgtgtgcacctgctgccagcagtccacgtcagctcagcaaaggctccaactcctccccaaacctctgtggtcacacacagtgagggcacccctcaccttcaacagcatctcccccacacacagtgagggcacccctcaccttcaacagcctctccctccacacagtgagggcacccctcaccttcaacagcctcccctcaccccacacagtgagggcacccctcaccttcaacagcatctcctcacccacagagtgagggcacccctcaccttcaacagcctctccccccccacacagggcacccccgaccttcaacagcctctcctcacccacacaccaattccgtggcgagtctctcggctcttcccagccacccctacaaagcaccattccctttgcattcggatgggtcctgttttgaggcttacccccgccagtttgacatctctgcttcagtggcctactaatttttctttttctttttcttttttgagatggagtctcgctgtgtcgcccaggctggaatgcaatggcgtgatctcaactcactgcaacctccgcctcctggattcaagcgattctcctgcctcagcctctccagcagttgggattacagatgcccgccatcacacctggataattttttattttagtacagatgagagttcaccatattggtcaggctggtctcgaactcctgacctcaggtgatccacctgtctcagcctcccaaagtgctgggattataggcgtgagctaccgcgcccggccggtagcctactaatttatttatttatttatttattttttctgagacggagtctcactctgtcgtccaggctggagtgcagtggcacgatctcggctcaccgcaagctccacctcccgggttcaagcaattctcctgcctcagcctcccgagtagctgggattacaggcgcccgccaccacgcccagctaatttttgtatttttagtagagacggggtttcaccatgttggtcaggctggtctcgaacccctgacctcgtgatccacctgcctcggcctcccaaagtgctaggattacaggcgtgagccaccgctcccggccagcctactaatttaaacaattaatgttcaagctatctctgaattaatacctgaactaaaagctgaatttcttccaagtcccaggttctcagcccatcgtaaaagctcattacaatgagattcccctcagaaagagctaaaaccaatcactggtttctcccgtcccaacagggcagaaagcattacaagccgggctgcttccaggaggtggcccatcctgcagcggccagctcaacacactctggcccttccctgatgtgtcccccttgccacaggtccgaggcccagaggcggcctgtgttgtggctctccatcagccctgacgccgcgtctctgtccctgtggactcggcctttcccagtgggaaccctgccttcccgtgtccaccttccaatcctcgtccaccacccgtctccagggccagcacccaagcgtttggggtttccaggcacaggtggcctggccctacacagagcccgcatcctctttgcgcaggacacttgaagtctgctggaacccccggatgtggggccctctgaccccagatgagggcgtcagtgatgctgcggtgctgcacctgcccgacccctgcacctgacccggggcctcttctccatccctcagccacagcccagaacgtctggacactgggcccagcgagcagcgaccaaactcatttcaagtctctctttttttctctaaaatcaatgctgttccaaagataaaccctctaacgcagccatgtctgcctagagaaatcctcaaaccatatcctttcatagctatgttcaaattcaatttgtgagaagactcttcttttcataagcccattgatggagccattttgtttcagtctttgcagttttttttgtttttgtttttgttttttaccttatctcccatctgtgtgtttgctctttcgttatttaccgtttctccttctctgtgttaccttacgttttggtccacgagaaactaagaaacatttttgacatcagcagtgttagcgttaggataatacaattcaagctcactgcacttagctgattaacttaccatgtactctgtccatcaaaatataataaagatatacaaagcttctagaacaaagcccgtcagaatgttcactgagtgagtcagaaaacagggacaaaaagataattttaaccttctaaaaaacaagaacaaaaaagggagaagtcaaatgccacaccattctctacacttggagctgcataatgagtaaatattttaggaatctgttttaagtcatctaccacctgcttaattctattttagtaagtggcataaccgccttcacaagcgaggatctgttgatggtgcaaatattgattcaatacaatgtacagacgtattcatctctcagcccagcttttgagaaatctgtcttatgttgagttaaaacaccggaaagccaaaaagcagactggcggtccccggggcagaggggaggggcagggcgaatggccactggacagcacagggctcctggaagtggccggtgctgacgctgcagtgtggtggtgattcaacgccgctttacacctgcaccgtaaaatgctcacatctgactttaagtgtgtggtttttgtgaaagcagctccctttctgcgtttttttttttttttttttttgagacggagtctcgctctgtcgcccaggctggagtgcagtggcgccatctcggctcactgcaagctccgcctcccaggttcacaccattctcctgcctcagcctcccaggtagctgggactacaggcacctgccaccacgcctggctaatttttttgtatttttagtagagacggggtttcaccgtgttagccaggatagtctcgatctcctgacctcgtgatccacctgcctcggcctcccaaagtgctgggatgacaggcgtgaaccactgagcagctccctttctgaacagtcaggagcagctcgcgcccaccagcaaccaccttctccggtagcctgaaggacaccacaagccttattattattattattattattttattttattttattttttgagatggagtcttgctctgtcgcccaggctggagtgcagtggcgcaatctcggctcactgcaagctccgcctcctgggttcacgccattctcctgcctcagcctcccgagtagctgggactacaggtgcctgccaccacgcccagctaattttttgtatttttagtagagacagggtttcactgtgttagccaggatggtctcgatctcctgatcttgtgatccgccttggcctcccaaagtgctgggatcacaggtgggagccactgcgcccggccgccacaagccttatttatttaaatcacctttgtcttaggacactaaactcccaaaaggtgaggcctgggaccagcatcaggctggacaagtgctgcagaggccacgccaaccctgtgcggccactgctgccccgcccagtcactaagcacctgcaggtcaccgagcacagggcagggggcagcctccaccaagcacagggcaggggccagcttccactgagctgtcaccaccacaggacacctggaaacacgaaggaacacggcccagaagcagtgtcctggagcgtggcagctgctgcccgagcaggctgcggggtgaacgcagtcgtgggaggctcacgaagagacatcgtcttggggaagggggatcaaggcagccacagtggctgtgggagggacagaggggccagatcccagagctcccctcacaacccatcagagtggtggattccctgaggctggttgtggggctggacatcttgtgaccacaactcccagggcctgagaagggggcagctgtcctcgggctggcccgtcctgctcagaccggaggcctggcagggttcgagggctcaactcaggcgggcccgggctctcagggtggggtgacctctgtcacggaggtctcatgcagccttggaccccacactggggcctgggtctctcctaggttcccatacacccaggggagtggccataggatccagtcctgccctggccctgggtcgcaggcaggagccccacccaccttggccacgacctgccaaagaggggtgtgggctctgggcggggccgctcgggggacgggacggcagttcccccacgtgtgtgagcttctcaactcaaagtcctggctggaggctggagggttccaggaggccaccccaccaaggctgcctgacactctttgcttctgaagttaaaaaaaatatcgcatatgaaaaagcttatttaaaatcaagtcattcatgcttggtactaaatatttaccactacaatcttatcacccatggacaactacgattaatatttcagtgtagttcatttcactgtttatgtatatatatgattttctttctacctagtagtaatacctataatgatatatgtaattttaacatttttcatatgaagtattgatacaaatgttttaattctaaaatataatttctgggccaggcacggtggctcacgcctttaatcccagcactttggaaggctgaggcagttgcatcacaaggtcaggggtttgagaccagcctggataacatggtgaaaccccgtctctactaaaaatacaaaaattagctgggcttggtggcgtgcacctgtagtcccagctactcaggaggctgaggcaggagaatcatttgaacccgggaggcagtgagctgagattgcgccattgcactccagcctgggcaacagagcaagactccatctcaaaaaaaaaaaaaaaaaaaaaaaaaaaaaagaaagagaaaagaaaatgatgtttgagagaaaattagctaaaaatgaaggcaaatatatctgcttcatatacattgaacacagttgccaaaacactacatgtggtaatatattaactcaaaaaacatgagtttttggtaggtaagtggtaaatgagctcccccacccccaactccttagtgaagatttggctaaaaatcaatttatataactcaaagattgctggctctcctagggaacataacttacctatggtaggaaatattacatttctagacaaaaaggcaaacgagagtaatacctctgaacagttagaagcagccgtctgggagaagtctcctaatacaggaagcagtagttaaccagtgcagtcagacactgggtagggaaaaaagcccctctgcttggatgagcacagcctcactcagcaacccaggctctgagtgcgaaacaagcaaccctgcagcaaagcatctcaaggctctgtgtggaggctttggagccaccagaactgggctcagatgggggatttctctagcactgtgattccaatcattaaaataacttactatacaataaattaaaagtaaaaatataaagtaaaagagataactccatcaataaaaaatataccaaattcggcaatctattattgtaggaatgcaaggttggttcgacctttgaaaatctatcaatgcaatttatcacatcaataaatcaaaaaagaaaaacccacatgatctcagtgaggcagcatttgacaaaatccaataccttttcacaacaaaagctctcagcaaactaggaatacaattcccttaacctgataaagtgcatcttaaaaaaaagaacctcaaagctaacattttacttaatggtaaaaaacagaacgctttccccatgaaaatgagaaaatattttccccatgaaaatatccactcttaccactccaattcaatatcattttggaagttataaccagggcaataaggcaacaaaaagaaagaaaaggcatgcagattaaaaccatctcgattaccagatgacattactatacacacacacacgcatgcacacacacacacacacaggcacgcatgcacacacacacatacacctctccaaaaaccaataagaaagctattagaactcataagtgaatttagtaagatcaaaatatacaaggccaacatggaaaaaaacagttgtatttttaaatactagcagtaaacaatcagaaattgaaattaaatagcactaggtacagtagcccccaaaccatgaaatacttgagtataaatctaaaaaaaagtgcaagacttatatattaaaagctacaaaccactaataaaaggaatcaaagaagacctaaataaatggagagacataccatgttcatgattgacagaatcagtattgttaagatgacaagtctccccaattgatctatagttttagtcccaatcaaaaatcctagcaggacttttcttggtagaaatcaacaaagccaacatttaaaaggaaagtcaaaagagcaaagttggaagactcagactcctcaaactcaagacttactatatatttaatcaacacagtatggtactggtataaaaaatactgaatagaaaaatggaacagaattgagtctagaaataggcccacacaaaaatggccaattgatgtttgaccaaagtgcaaaggccatacaataaagaatagtcttttcaacaaatgctgctggaacaattagacatccctgtgcaaaagtaacgaatctcaatctatacctcacactatattaaaaaacgaacccggccgggcacggtgactcatgcctgcaatcccagcactttgggagaccgaggcaggcagatcatgaggtcaggagatcgagaccatcctggctaacaaggtaaaaccctgtctctattaaaaatacaaaaattagccgggcatggtggcacacgcctgtaatcccaggtactcgggaggctgaggcaggagaattgcttgaatccgggagatggagcttgcagtgagccgagatcatgccactgcattccagcctgggctacagagtgagactccatctcaaaaacaaacaaagaaacaaacaaacaaaaaaacccaaaatggaccatagtcataaatgtaaaatctaaaattataaaatttctagaagaaaatctttgtgactttgggttaggcaaagatttcttagatatgacattaaaaggatggtctataaaagaaaaaaactgatcaactggatttcttcaaaagtaaaaactcttattctttaaaagatactaaatggaaagaaaaggcacagatggggtgaaaatacttgaaaacacatttctgggtaaagacttacatccaaaacgtatttaaacattctcaaaattcaataaaaagaaaataaacaattcaggtttttcaaaataagcaaaagaggccagacatagtggctcacaactgtaatcccaccactttgggaggccgaggtaggatgatctcttgagcccaggatctcttgaggatctctcaagggcagtctggacaatatagtgagaccctcatctctacaaaacttttctttttttaattagccaggcctggtggtgtgcacttggagtccagctactggggaaacaggtgggaggatcacttgagcccagtaggtggagactgcagtgagctatgacttgcaccactgcactccagcctgggcaacagagcaagaccctgtttccaaaaaaaaaaaaaaaaaagaaaagaaaagaaaagaaaaagtgggcaaaagatctgaaaagacacttcaccaaagagaatatgaggatggtagatgagcacaggaaatgcaaattaaaattacaataagatactggccgggcgcagcggctaacgcctgtaatcccagcactttgggaggccgaggcgggtggatcacctgaagtcaggagttcgagaccagcctggccaacatggtgaaaccctgtctctactaaaaatacaaaaattagctgggtgtggtggcaggcacctgtaatcccagctactcgggaggctgaggcaggagaatcgcttgaacccgggaggcaggggttgcagtgagccaagattgcgcttttgcactctagcctgggtgagagagtgagactctgtctcaaaaaaaaaaaaaaaaaattacaatgagataccactgcacacccatgagtggctaacatttaaaaaaaacaaaaccaaagaatgttgacaactgaaacactcacacactgctgacggggatgcaaacggtgtggtcagtgtggaaaagggtttggcagtttcttataaagttaatcattcatttatcatatgacctagcaactccacccctggatatttacccaagtgaaataaaaacaagttcgcacaaaaacgagtcataaacatgcacagtggcttttttcatagatcgccaaaagctggaaatcacccagaccctcctcagagggtgggtgggtgatggactgtggttcatctctactgtcccacaatcaaaagcaatgagctcttggtgcacctgacaagtcagatggcttcagaggctcagggctgctgagtgaccggagccaggttcaaaggcctccgggatgcaggcacgttggaggctgaggaggtggggttggggaggggctgcctacaaagaggctgcggaaacttctgcgtggtggaggtgttctccaccttgaccgtgatggcggtcacaccactgtctttgtcaaaactcaagacggggccaggcacggtggcccacgcctgtaatcctagaactctgggaggtcgaggcgggtggatcacctgaggtcaggagttcgagaccagcctggccaatatggcaaaaccccatctctactaaaaatagaaaaattacccgggcgtggtggcaggcgcctataatcccagctactcaggaggctgaggcaggagaatcgcttgaatccaaaggcaggggttgcagtgagccgagatcataccattgcactccagcctgggtgacaagagtgaaactctgtctcaaaaaaggaaaaaaaaaacaaaaaaactcaagaagggagacattttactgtaagtaaaccatatctcaataaaagcagagaggaagcgggagaggaaaggaatggggagggggagggaggacggaggagggagggggagggggaagtgggccagaagggaaaaggagggtggggagggaggaggaggagaaacaccacagaaagagacagcacacgcagtggtcctcaactgtggccgtgcactcaactgaacgcagattcctggggcctccttggagtcaccaagtccttcaccgcacacagggacgaagcttcagtgctccaaccccaagcatggacgaccggcagaatgagctgtgtagcccgtagggtcccaaggagacagcccagcagtgaaacgctcagatggggcgggccccaggcacccggcctgcctccagggcaggtcctaggggcccctccagggccctagccaacaggaaccaacagggccaggggctccagtgctgaagctccaagaagaggggacccacagggtccctgggtgcccagctcttccttcatgagaacgaaactgtcctttcgggtttcaccatctatctatactgggttgaagtgtcccccaaaggctcacattcacccagaacttcagaatgtgacctgattcggaaacaggatctcttcttcttcttctttttttttttttttgagacggagtctcgccctgtcacccaggctggagtgcgatggtgcgatctcagctcactgcaacctccacctcctggattcaaacgattctcctacctcagcctcccaagtagctgggattacaggtgcccgccaccacacccagctaatttttgtatttttagtagagacggggtttcaccatgttggccaggctggtctcaaactgctgaactcgtgatctgcccgccttggcctcccaaagtgctgggattacaggcgtgagccaccgcacccagccttcttttttttttttttttttgagacaaagtctcactctgtcatccaggctggaggctggagtgcagtggcacgatctcagctcactgaaacctccgcttccggggttcaagtgattctcctgcctcagcctcctaagcagctgagataacaggcacctgccaccacgcccagctaatttttgtatttttagtagagatgggatttccccatgttggccaggctggtctcgaactcctgacctcaagtgatccacctgcctcggcctcccaaagtgatgggattataggcatgagccaccgcgcccggccaagggtcttttcagatgtaatcaagttaagatgaggtcatactgagttaggtgggccctaaatccaatggctagtgttcttataagcacagagagatttggggacacagacacccaggagagaaggctgtgtgacgacagacagcagggactggaacggtgctgccacaggccacagaacgccgagggctgccagcagcaccccagaagtcaggggagtcaggaagggtccccgcttagagcctgccaagggagcgtggcccaggcaacaccttcattctgggcttctggtctctagaactgtgagagaataaatctctgtttcaatttgtccaaaagccccttcactcagcagctcttttccattagtcacagcagcccatccaaaagccacttcactcagcagctctggagccccccaccttcctccacgttcctcccgtccagtgctggggggaaggatgctcagagctcaggggcatggaagaccctcccatccagtgctggggcgaagggtgctcagaggtcaagggcatggaagaccctcccgtccagtgctggggggaaggaggctcagagctcaggggtatcaaagaccctcctgtccagtgctggggggaagggtgctcagaggtcaagggcatggaagactcttgtctgtgggcccccccacacccccgatgatgcccagatctgatgacgctggcctctatgtctctccaaagtcaaaccaacacgacgcaatttgaacccgtgagtgtaccacagtgttctctcctcaaacatacgtggcctcctgagctggaagaaacagactttatttccagatgaattttattaatctaagagaaaatttcatactcttcatacttatctatttactctttcctattaagataataacttctggccttatgtattagggtcactaaagtttaatatgtatatttatgcctctgtaaacttgtttttgcttttatttttagtcaaacaaaatgccagtcctatcacgagtcacaaatataaataacacaccagttgattcaaattcaggagcaaactttgctgagtcacattagggggagggtaattaattaattattagctgcaagaagttgagatacgtaacccacataaagtaaaaacagcctgaggctcattcctagctgagaaaaccccaagatctgttacaatggcctcgttgttctccactgacagctttctggggctctctctccaggacatggccgccagcttctgtgagaggtgctggcatcctcggagagactgagaagtcaagcacagggttcctggaaaaccagccctcctgactggctgccgatcatgcagggcaggtgccttcaagactttacgcccccagccaggcgcggtggctcatgtctgcaatctcaacactttgggaagctgaggcaggaggatcgcttgagcccagaaattcaagacaagcctgggcggcatagcaagaccctctctctactaaaaataaaataattagccgggcatggtggcatgcacctatagtcccagccaactggggggctgaggtgagaggactgtttgagcccaggaggtcaaagctccattaagctgtgatcgcaccactgcactccagcctgggcaataagccagacccggtttcaaaaaagactttacatccctgaaagttttcatttcatggtgctgagcgtccatcagtccatccttctctctgccagccggggcccaaaacacactaagtcaccatcacgcccagctaatttttaaactttctgtagagacgaggtttccctatatttcctaggctggtctgaactcctgagctcaagcgatcccaaagtgctgggattacaggtgtgagccaccatgcctggccctcatgaccacttttaaaaattgttttgggccgggcacggtagctcacgcctgtaatcccagcactttgggagtccgaggcgggtagatcacgaggtcaggagttcgagaccagcctgaccaacatggtgaaaccccatctctattaaaaataccaaaaaattagccaggcgtggaggcaggcgcctgtaatcccagctactcaggaggcttgaggcaggagaagtgcttgaagccgggaggcggagggtgcagtgagctaagaacacgccacagcactccagctgggtgacaaagcgagactccgtctcaaaaatacataaataaataaacaaatagttttgtttgggccgggcgtggtggctcacgcctgtaatcccagcactttgggaggctgaggcaggtggatcacctgaggtcaggagttcgagaccagcctggccaacatagtgaaaccccgtctttactaaaaatacaaaaattagccgggcatggtggtgcatgcctgtaatcccagctactcaggacactgaggcaggaaaattgcttgaacccaggaagcagaggttgcagtgagccaagatcgcaccactgcactccagcctgagcaacagagtaagactctgtctcaaaaaaaatttaaaaattgttttgtttgataaagtctagatctctaatatttttatgcccaagccctttggatgctgttgttcttttcaggttttgtgtatatagagctaattaagctgaagaatcctgggaataaagtttaaaataaaggttaaaaacatctctgaatgtgaacagtacccacagccagcacataccagctgattccactgttgcctctgacgccccttgccactgtcttcactccaaatgcacccagcgcggagcagcctgcactcctggggcaggaggagcagtgagcaggtgcggctggcaggatgaggcaggactgcgggtctgcctgctccagctgcgtccactctgcaccacggtggtgcctggtgccaggctggtggacaggctggtgacaggggactcaggggcgatgggtgggcctccagcccccagagctgaccctctctctgcctggagaaacctggctggcttgctttgagcctctcccagcctgtcactggaaatcaggttcacctggggctggggttacagaagtaacaggtcaagctaaaggatggtcatcagggcggggagaggaccctgcaggacacaggcgaggtggggccgaattgagggcttctaatggcaaaacttgatacaatgcaatggtgttattttcaaatgcatagagacatttaatgtattttaaaaattaattttctcacaagtggtaccgcaggaggtaaagaagtagaaaactggccgggcacgtggctcacacctgtaatcccagcactttcggaggccaaggcgggtggatcacgaggtcaggagttcaagatcagcctggccaagatggtgaaaccccgtctccactaaaactacaaaaaattagctggacgtgatggtgggcacctgtaatccgagctactcaggaggctgaggcagagaattgcttggacccaggaggcggaggttgcagtgaaccgagatcgtgccactgcactccagcctgggtgacagagcaaaacttcatctcaaaaaaaaaaaaaaagaagtagaaaaccatcatctcctccttaaggactgcactataaagaagcaggataaaatatgatttgactttcagttcaaacttgaaagtgatgactttataaatcgtgttttatatctcgaggtggttgccaagggaaaccagaagagtagctgtattaatcagcaaatccacctctgtctgaagaatcagagggagcatggagtgtgcatgtgtgtccaggggaagatctgcagaattggagggagcacggagtgtgcacacgtgttctcggggagcagagagtgtgtttgtgtgtccaggggaagatctgcagaattggagggagacggagtgtgcatgtgtgttcctgggagcagagagtgtgtacgtgtgtccagggggagatctgcagaattggaaggagcatggagtgtgcacatgtgttctcagggagcagagagtgtgcacgtgtgtccaggagaagatctgcagaattggagggagcatggagtgtgcacgtgtgttgccggggagcagagagtgtgcacgtgtgtccaggagaagatctgcagaattggagggagcatggagtgtgcacgtgtgttgccggggagcagagagtgtgcacgtgtgtccaggggaagatctgcagaattggagggagcatggagtgtgcacatgtgttcccggggagcagagagtgtgcacgtgtgtgcaggggaagatctgcagaattggagggagatggagtgtgcatgtgtgttcctggggaacagagagtgtgcacgtgtgtccaggggaagatctgcagaattggagggagatgaagtgtgcatgtgtgttcctggggaacagagagtgtgcacgtgtgtccaggggaagatctgcagaattggagagagacggagtgtgcacgtttgccccgggggagcatggagtgggcacgcatgtcccaggggaacatctgtccaaggcaaagaggaaggagcaaaccccagcaactgtgtcactttccataacggaggctctgatgctcgtctccgggaagaaaagctccctcagtggagccttctcccaacattaaacattggaaacagaggggagggccaggccctgcacctgcaccccggtgtgtccacgcaccgtgtagtcttgagggagtggctcagcctctctgggcctcacaatataacctctctcaagatgattccccctctcagtaagtgagggttattattattagctcttagcaaaaatgaaacaaagaaagaacaatgggacttttatgctgggaaaaggacactgaagaaacagccaggagaaaggattggagaagacaatgaggccctcatgctggggaaaagggtgggaggcaagaggtggtggcatctggtgtagttaatccacccccctccctgtcaccaataaacatgtgcaaaaggccgggcgcggtggctcacgcctgtaatcccagctactcgggaggcccaggcaggcggattgcctgaggtcaggagttcgagaccagcctgaccaacatggtgaaacccccatctctactaaaaatacaaaaattagccgggcatggtacacctgtaatcccagctactcggggggctgaggcaggagaatcacttgaacccaggaggcagaggttgcagtgagccgatgtggcaccattgcactccagcctgggcgacagagcgagactccatctcaaaaaacaacaacaaaaaaatgggcaaaaggcagaaaactcagcactcagagaagggacacaatctggtgttggaagcaccagctggggtggcggaaaggcagggccctgctgtgccccgaccatatcctgggccagcctggtgacgccttccttctacccctgcctggagagaaatggaacttccgaggggaaagagcgtgaaccggggacccagctgccagacggaaatggggtccaggccaccaggaaccaggggtaccagcgtgtgtgaggtgtgttgcagaacagaagacacttccctgggtaaccagcagagcagtggggcccgcacggtccgtgggctgaggtgacaggcagagcagtggggcccgcacggtccgtgggctgaggtgacaggcagagcagtggggcccgcacggtccgtgggctgaggtgacaggcagagcagtggggcccgcacggtccgtgggctgaggtgacaggcagagcagtggggcccgcacggtccgtgggctgaggtgacaggcagagcagtggggcccgcacggtccgtgggctgaggtgacaggcagagcagtggggtccacatagtctgtggagtcaagttgccgacagggtccaagatccaagaactctgccctgcaactacagaccgagaggaagacaaacgcccaggagggagaatccaggcctcgctgaccgtatcggagcaaagggaacacctgggcacagctgcctgagcaaggacaagatgcatctgactgccctggccagcacagggcatgcccatccacagaagacagagtctgacccggggcacacacacaagagacaggcgggccaacggtgcagacccagacccacaggcgggctctcagctgggacaacggtggccgtgcgatgcggggtgggggtggggggcatccgactgaaaaaagtgtgtctcgatccctgcctcaggcctcaccccagctggaggcagccattcatgtcaaaggtaaaacgatgcttgtagagaacattttttttttaaatctgggagcagcaaaggtttgttcaacaggacccaaagtcctaaccacaaaacactgataatttggattatgttaaaattaagagcttctgttcatccaaaaataccactgaaggagtggaaaggtgacgtgcagatgagagtggctatccaggatcacacagccgacaaaggactcacagccagaatctatattttaaacactcctagcaagcattgaaagaaattcaacctaaatgaaaaaacagacataagacttgggcatttttcttctttctgtttctattttttttctttttttttggagacagagtcccactctgttgcccaggctggtgtgcagtggtgcgatctcagctcactgcaacctccgcctcccgggttcaagtgcttctcctgcctcagtctcccgagtagctgggaatacaggtgcccgccaccacacctggctaatttttttttgtatttttagtagagatggggtttcaccaagttagccaggctggtctcgaactcttgacctctggtgatccatccgcctcggcctctgaaagtgctgggattgcagacgtgagccaccaggcccggccgacttgggcatttttccaaagaggaatttcgcatagacgtatgaaaaggtgctcagtcatcagagaaatgcaaaggcaaactacacaccacagaaggacagagacagccccgtgctgagagggaagatgatgcagccggggcctccagctttgctggtgggagcaccaagtgaaaaatgctttgcgagaatctactacagggaaacctgtgcagacatttgcgtgcctgatacccagcgattcacacgcatagggacctttcaacagaaatgcaaaggatgtgtactaggaatgttcatggcagaacaaaccataatagtcagaaacctgaaaccacccaaatgcccgtcacccgcaggatggagaataaatcacggtagagtcacaaaagggatgtcaccaccatgagaattaacaccccacagcctcacacaacatgggagagtctctttcacataacgggggccagagacacagtcacagaagtgcacattggccaggcgcagtggctcacgcctgtaattccagcactttgggaggccgaggcgggcagatcaccttaggcccggagttccagaccatcctggctaacaaagtgaaaccccgtctctactaaaaatacaaaaattagccaggcgtggtggcgcacacctgtagtcccagctactcaggaggctgagacaggaaaatcgcttgaacctgggaggcagaggttgcagtgagctgagatcgtgccactgcactccagcctgggcaacagagcgagactccatctcaaaaaaaaaaaaaaaaaaaaggaaaactccaaaactaagagaaaattaggagacaaaaataacatctttactgaactaatcaataagttagaaacagctagaacagtttactgaaatcaaaattaccaacaaataggaaaggcataagataatcagaaaaattcaggccgcgcactgtggctcacacctgtaatcccagcactttgggaggctgagctaagcagatcacctgaggttaggggttcgagaccaccctggccaacatggaaaccccgtctctactaaaaatacaaaaacaaattggcccagtgtggtggcaggcacctgtaatcccagctacctgggaggttgaagcaggcgaatcacttgaacctgggaggtggaggttgcagtgaggtgagatcacaccactgcactccaacctgggcaacagattgagactacatctaagaaaaaaaaaatacatacacacacacatacacacacacacctggaaactcaaagagtacgttcatactaaaagtttaacacaaacattcaactctgagacatggtctggttaagcagaagaactatgagacaaaaagaaagaattcctcagaaattcatgaagggaaggacaagcctccacatggggaaaaatcagctgacctcaggcttccccacagcacatgtgagccaggggatggtggaatgacagctgcaaagtgttggggaagaaaataaatctaagagtattatacccagccaagatatctctacattgttcaaagataaagaccatgggcagacattctcagacacaaaaaaacactcaggaaatactcgagtccttctgaaaaaacgactgataatgaaatctaggtgattaagagggacagcacaatgaacagagacataaatggtaaaaggactttggtgagcactgactgtatttaaatgttgaattgatactaaatcattgcgggcactacagccacaatacagaagcaagggctataaacctggacaatataaaaataacagcctgggctacaaaactcaggaggaattgggtggagggaaatggagtgtggagttacgaacgccctcatctttctttctttctttctttcttttttttttttcgagacaaaatctcactctgtcgctgggctggagtgcaatggtgtgatctcagctcacttcaccctccacctcctgggttccagcgattctcctgcctcagcctcccaagtagctgggattacaggcacgcggcaccacgcccagctaatttttgtatttttagtagagatagggtttcaccatgttgaccaggctggtctcaaactcctgacctcatgacccgcccaccttggcctccccaagtgctgggattacagctgtgagccactgcgcccggctgccctcacctttcaataacaagcacctatagtgtttctcagcgaaacatgtcattaaaaaaaaaaaaaaacatggccaggtgctgtggctcaggcctataatctcagcatttgaggaggccaaaaaaggaggatggcttgaacccaggagggtcaaggctgcagtgatctgcaatcacaccactgcactccagcctgggcggcagagaagaccctgtctctgaaaaaataaaaaacaaaacataatgatctcaacttcttactatttttcagaatatcttttcttaactctaaaacaaatatttggtaaatcaaaaacctgcaagggtacacccgtgatatcagttttttctacagcagctcaggccaagtagacaataaagctcttgatgggattttttttttaagacagaatttcgctcttgttgcccaggctggagtacaatggtgcgatctctgcaacctccgcctcccgggttcaagcaattctcctgcctcagcctcccgagtagctgggattacagacatgtgacaccatgctcggctaatttttgtatttatagtagagacagggtttctccatgttgatcaggctggtctcgaacccctgacctcaggtgatccgcccgccttggcctcccaaagccgggattacaggtgtgagccaccgcccccggcccggtgggaggtgtatttttagcctaaatcctccctccgtgtcaagggaaagcctttattacaaagcattggaccattgttttggttcgtcctcagttcggcatgtagcaaccaaaagtcacgcagcagaagcatccccgagcctccattcaaaccaaccagaaggaagtttcacaaacattctgtgcgtgacccttctcacacacgccccacggcactcaccttcaatcaaactcaacactgtcaaccgtctgctcccccaaaacacgcacagctcttaaagcgccatattcgtctgggcgtacacgttgttgggtgctttattcctgtagctctggtagggttcatccctcactgagcccagaccccgagggcacagtgcagacaaagccctgtcctccaggcgctcaatctccagccctgtcctccaggcgctcaatctccagccctgtcctccaggcgctcaatctccagccctgtcctccaggcgctcaatctccagccctgtcctccaggcgctcaatctccagccctgtcctccaggcgctcaatctccagccctgtcctccaggcgctcaatctccagccctgtcctccaggcgctcaatctccagccctgtcctccaggcgctcaatctccagggcagcgctggccctcggactttgccacagcgacatccgaactatctagaaatgtgacgaatggaagctttttgttttctttccttctaattacacttccacagccacacgtggctcatggcatcctactggacaccacggtcctagagacctgccaccgagcggggaggggggtaggacatgcgggggcagcggcgcctggggacaggtagagacgcaggctcccctcctgccccacggagcacactctgcacccaccagctgccagagactcccccgcatgctgcagtttcaggaggcctctgggtgctggtcgtgagcccaagcccatctcagctgctcccccaaactctgcccattcctcaccccgtcccctaagctgaggtgtggccgggcacctgagtcccaccccacgctccacagtctcaggccaccccctccagccgtgccacactcccttggtgctcacgccgcctgcctggagctgcccttaggggacagcctgcaccctctaccgagcagcctcagatcccgcttcctcccaccctctcccgctaagttcgtctctggcaggaccctggacctggggcttcccagacccttcccaggccccagagctgacaggtccttcccaccaagactccatctccacgcccggctgccctcctccgcccaggactcagagcgggtctctgttggaagcgtgggttcagccccgaggcgcggcaggaaggtgggcacaggctgggctccttccacagcctcagggtcggcctcgtccaagctgttccagggatgcgcgtgggtgaaggccccgcctgctcctcactcccagccgaggtgttcgcctctgcgcgttcccccttctcctgggttcctgcccccgcctttctttccccggagccgtccaccccctcgccgggcgccggctttcaagcctcaaacttgggggatccccgggctgcctgcctgggagctctgggcgctccggcctcccctcgccctggaacccgctctccggccgctgtcgtggggggtcccctcttccgcacgcgagtcacctgtgctccttcctctcccccggacacgcgggacccctggcctcgggaccggaccctggtctcccctcccctccgacccacgcgcagacccagcacctgggcgcctgctcgccgcgctccgccccaggagccccggagctcgcgtcccctcccgcccctcctgccccgcggccgaacgcgcacttgcggactcgagcccccgccccgggtccccacagcagcggccccaggtcgggaggagcccagcgcccggcccagccgcgggctcccgctgcgcgcagactgcggagaaggatggagactgcgccgcggggcctcgagtggaactgggggtgcaacagggacgccgcagcacgagggccagggccgggcggagaaaggcccgcccgcgaaccgcgctcctcctcagccccgcgcccccggaccgggactcctaccctccccggccacgcgccccggcctcttcccgacccctgcccggtctcgcgtccccggacccggacccccacccgcaccccctccccagccccgcgcccctccccggccccgcgcccgcaccccggcacgccctccgcccgcgctcacccgccgggtggccgtacggggactcggccgcgccatcctgcaggctcgccaggatctcgcccttgcccacgtcgctgtcgcccaccagcaggaacttgagcagaaagtcgtaggcccggaccgggctgcccagggcgctcatcgtgacggcccggcgcccccacccatgcccggcctgcggggctgagcgcagaggcggcggcccggccccgagaggcgccgcgcgggccccgagtccttgctcgcctccggccccgccccgccgcccagcgctgacagcgcgcatccccgcccggccccgccattggtggaccgcagttgctagggcagctgcgcgctttcactggcttggttgtccgtccatcttactctcgtcaccgcctccgggctgtcgcccacccgcccctcctgaaaggtcgctgtcaccacagccaatggaggcccggagacggggcaggggcggagccagaacaagcaggaggcggggactctgctcccgcagccaatggcggggcggggtgggggcgatcagggggtggggccgggtgtttacactctcgcgtgcgcccgtgagcgccacgaactcgctcccacggtcgtcgggtctgcacgccccgagtcgggaggggcgaggggcggtgcagggtcccagcgtggggcctccccacctgcccaccagggagacctcgggtgcctggccgggtggggctcggggtcggtccagttggcggacgcggccggaaggcccccgcaggccgcctcgccggaggagtccctgtcgccgtagaatccaggctcgcggtctctccccacggttcatccagggcctcgtcgttgccccatttacgcggcgtgcctgaatgcctgtgtgtgcacatgcgcctgtgtacgtgtgcatgtgttcgtgtgtgtgcatgtctgcgtgtgcatgtgtgcctctgcagatatctgcacatgtatgtgtctgcgtgtgcatgtgtccctctgcaggtgtctgcacatctatgtgtctgcgtgtgcatgtgtccctctgcaggtgtctgcacatgtatgtgcgtgtgcatgtgtccctctgcagatgtctgcacatctgtgtgtctgcgtgtgcatgtgtgcctctgcaggtgtctgcacatgtatgtgcgtgtgcatgtgtgcctttgcaggcatctttgcatgtgtgtgtctgcgtgtgctgcttctatgcatgcgctcctatgtgtgcgtgcgcttgtttgtgcatccatgcatgtgtttgcgtgcgtgctggaggagagcattgggtgggaccctccagccttttggcttctcctctgctctagagagcaagggttgccaggccgaggtctgcccttcgctctgagggtctcaccaggtgcacattggtttatttggtgcagaattcaggcagcaggcaaagggcgagctccgtccaagaagaaggataatgcccccactacttcatcccctccaccctgcgttgtgtagggaactgctctagaccccattagaagttttttgtgggggaggaacagaagagggagcggaagaagaattacaaaagagactgaagtcaagattattatatttgtcatttgcattcatttggacctagaaaatgtttactttggaatgccaatttagtttgcaacacctgttattcattggttgattagttgctttagttactaatgcagccacatttttttttttttgagacagagtcttgctctgttgcccaggctggagtgcagtgatgtaatcttggctcactgcaacttccacctcctggattcaagcctcccaagtagctaggattacaggcatgtgccaccacacccagctaatttttgcatttttagtagagatgggattttgccatgttggccaggctggtctttgactcctgacctcaagtgatcgacctcggcctcccaaaatgctgggattgcagcactgtttttttttagaaggaaggtcagaggaagaaaagaggatggaaggtggacgctagaaaactatgagaaagatggcatttagtccccagccccaccactctgccaaaaagaattcaggggagtttccttcccatccctaaccctcagtctccatgttccaatcagctgtgggtcacatggctattacctagtgaggaaagggtaccttcttttgctcgctccccacctacacatccagactcactgtacaataggggtcaggaggcccccagcccaccctcggggtcacacccagcagtccagcagtgttcacggtggggcatggagaggggtggccagaccacttcctacagaggacaggtgatgggggagcccttgtctgctcttctcctgccccacagaaggtcctcaccacctcctagttgtcacctccaagctggccttggctgagctggaacatggccactcccacctggagggccaggtaaaataaccacgtcagaagagggctgtgttcagatatggtgtccatcttcttgccccaaacattgctttcaccaaacagaggtgtttatttctacagccaaagcaggtttcctcccaccagggcccccagtttcctgagggacagtcctgtggtgggatacctcttcctcctccccagtttcagtacatgtgtaaagtccaggcagagggtggaggtgtctggacagcactagcctaccttctgcccaactcagagccaggcttccagacctgtccatctcggatcatcggaacattcctccctgtggccacgctgaaatctccttgaacatccacccacccatgatctggggctgctctggagactaggcctctgtgggcagaaggaatgaaaggaacatttactgatgcttctccacgagtaaaatgtcatcagaaggtggaggtgaggccgggcgtggtggctcatgcttgtaatcccagcactttgggaagccaaggtgggtggatcacttgaggtcaggagttcgagaccagcctggttaacgtagcaaaaccccatctctactaaaaatacaaaaattagctgagcacggtggcgctagcctgtagtcccagctactcaggaggctgaggcaggagaattgcttgaacccaggaggcagaggttgtagtgagccgctgtcacaccactggactccggcctgggcaacagagtgagatgctatcttaaaaaaaaaaaaaaaaaggccgggcgcggtggctcaagcctgtaatcccagcactttgggaggccaaggcgggtggatcacgagttcaggagatcgagactatcctggctaacacggtgaaaccccgtctctactaaaaatacaaaaaaattagccgggcgtggtggcaggcgcctgtagtcccagctatttgggagtcagaagaatggcgtgaaacagggaggcggagcttgcagtgagccaagatcgtgccactgcactccagctggggtgagagagcgagactccgtctcaaaaaaaaaaaagtcatcttgtttaggcttgtctgcagtcgtgagaaaacaggagacaaaggttcaccacgtatgaagttttggttgtctgggttgaatggagtccctaaaaagatttattgaaatcacaccctctggaagctgtgactgtgaccttagttggaaatactttggtctttgcagatgtaatcaggttaggaggaggtccgtagggtgggctctaatccaataggaccatgaaagggtctcagagacctgtgggggcccatgggccccactgtgaaaactgctgctctgagccatgcctgtgctcctgccaactcctgcctgtgaccatgtaggtgtggcccacgaggagactccagcagtgagatgtgagggcgtctgctgggggttcgcaaacaggaacgcagactccaagtctcctctcagcgtctgggcactgtgggcccacccacgagcctcctgtcctgtgatacagagcagctccctggtgccacctccagatggattttctgttgctggaagttaaaccagcctcagtaattcacataatatctatttcagcattttcccacggagggggcacagggagggggcatttttcttttttcttcttccaaatttagcttgaaggctaacatgtttttcatttttaaaatagttccgtctgtgatgtgcaaacagtggaaatgcaacttgaaccagcctaagcacgatgtcgattttatggaaggatggttgggagtgtctcctgtgagctgggaagggctgaccggctgtgctgtgggaagggccaggtgtggccggcctggaagtagctgagccagggacccagtgccggcgaggccggcccacctgccgcctttgttcctcccacggtgcccgctggtcttcctgtcgctgcagaggggctccctcctcacaggagaaaacatggcccccaggtttcaccccttggagagagaacggcctcactcactctcaggtctgatccccaaattcccatataagggaattccccagtggggatcagtgcccacctccgggtgaatcaactacattgggggtctcatcatgcttggggccccgcatctctgcatcttagtgcgtcctctgagcgcacggaactgaaaccccagcagatgacgcagcttccagccgggagggccagcgggggcagaggcaacaaggtcacagctggatgaggctggtgggcgaggcagaggccgtcgccaggcccctctctgctctcccctgcactacgggacccctgcaccgctgcccctcacacagtcccctcttcccttcagaagcagagccccccgccagtggttcccacgctggagcagggcacagcggccacacccagaggctcccattcagcactgggggcccaggaatctgcatttgcaacgtggttacagatggtggtgatgctacagctccaggaaccccactttgagaactaagtgggaggggatctctccaaacatggctgcaccagcgcccacccccgacgggagacagcacgtgccttccgagtgctcataggggaagcctgcgtccgccttccagccctgtggtctctggtcttcccagcgggtgagggccccgggcactggctctgccctttgggcacagcagggagggttcggggatggctgctggccgtggctgggacataagagacccaggatgagtgcttggggcgcttctccatccacccttgagacccctcaggccccaccttattgtctcacctgactccccccaaaccccacctcaaacctgacccccacctgaccctcacctcaaacctgacccccgctcaacccccacctctcaccatacctctcacccaacccccacccaactcccacctctcactcgacccccacctctcacccaacccccactcgacccccacccaaccctcacctgacctcttcacacccccacctcaaacctgacccccacctctcactctatcctcacccctcacctgaccccacccgacctgcacctccaacctgactctcacccaatcctccactcttatccgacccccacctgacccctacccaaccctcacctgacctcttcacacccccacctctactgcagtccggcggagcccacgtgccctactcacactggctgcgcctcctggcaccgctgagctcatggccctgttgtgttctgctcctgccccatgtgagggcacagcccacgtctgctcttctcagctgttttgctgaggacaccagacgatgtgtttctggaatactccatgccactccagcacctgaaaaaaccaggcccccgttttgcacgtgcgtggcccttctcactgggtcagcgcccctgggtccttcaggactccacccgggggtcgacagctccggcaggaagcccctctgccctggtcccatcagaaccatcagtggacacacctgtcgcctccagggcggggctgaccacagggcaatgctgccacacctccccggggagtgaactttgacttctcctccacactgactgtgcagccctggaaggtttgtagtgaacttgtagaaaacggaaaacgtgaccctgcctggcccagcggttttggtcctgtggacccagcagcctggcgtctgacttagcaattctgtgtcactgctgcttccaccggctgcagaatcggggctttcaggaacgtctccagccagctcctgagtctttccgggccccccactcatgacccgggtgaacctaacgtgcgttcacctcccatttatgtgagggtgacgttctaacaacttgagaccacgaccatgcccaggggagtgtgggctctctgcaggcatccggcgcgtttccagacacagctgaggccggacgtgctgggtcagtgagggctgagatgtgcagcctcgggcctttcctgggacactcccccgaccctgcctgtcatcccgacatgcccctcagcattcctacactcataggaatgagtcctgcactcataggaaatggggggctcaggcaggtgggtggtctgtcctcaggacaacccaaatccccgacccaaacctcttcactcccgtctcgtgctcaccaccgtgcagcctcttaatgaaccacctcccacccctcggagccaggcagggcgcgctgtgcatggggatgggtctgagctggtcttgagtcggtggaaccctggaagaagtggctccgtcattctcgttgccatgggccatctggccctgcaggtgtggatcggggacagtgaggatgcaggactggtctgcagctgcagagtccaaagacgggagcccaaagtccccatcttcaaagactatcactttgcaggtagagttccagtggattaatctgggggcacacaaacatttggtccataaaagactatcactttgcaggtacagttccagtagattaatctgggggcacacaaacatttggtccacaatagggcccatggtgggggggggacctgggcaccaccgagggtggaagcaagttgtggaatgtggagcccaccccattagagcctgggcagggaggtgggtgcggctgtccctcggcctctggtccaggggcccttggatggccctcagcactaagcgagggtgtctccaacccagcccgtggatgcgtggggccgagggttcttggttggggtgcacctgagcactgtggggtgttgggcagtgtcctggcccccgtacgttagatgccagcaacactgccacctcctacaacaatcagaaatgctcccagaattgtcaaagtggggggtgctgcccttcccaacagttgaagagcactggttgacagaaatttgatttccatgtggcagcctctctcccgagagcctcatcctgtccccacactgcaaggcgtgttcccaaggttgggctccgtcctggtggctcccgccggcatctcctgggcagctgtgactgctgtgtccaccgggccggggtgtctgccgtagcccagcatgcagtggagaggatggccacggggacagcggggctgggggcaagggaggatccagaagcatccggcctggggccgacgggtagtgaccatctcagggcatccgaggttcacccacgttcgcctcccagaaaccctgagaggtggaggttatcattcctgctgctgcctgaggaaacagggactcagagaaaccgtgctggtcactgtcctgcctcggcctccctcgctggagctggtcagcactgcagcgcagccccagccttgtttggtttttattttattttatttattttgagatggagtctcgctctgtctcccaggctggagtgcaatggcgcgatctcggcccaccgcaacctctgcctcctgtgttcaagtgattctcctgcctcggcctcccaagtagctgggattacaggcatgagccaccacacccggctaatttttgtatttttagtagagacaggttttctctgtgttggccaggctggtctcgaactcctgacctcaagtgatctacctgccttggcttgccaaagtgccgggattacaggcatgagccactgtgcccggcctgtttggatctttaaatggtggtaaaatgtaggcgacatgaaacttactatcacccttttccagtgcagcgtccaggggcatcaagcacattcacaccgcggcgcagccgtcaccaccctccatctccaggtcttctccatctccccagacagaacctcggtcccaccaaatgtcagctctccgtcctcccctgacccctacaacatcatttacgtcctgtctctacagatttgacaactctagggacctcgtataagtggaatgacacagtattgtctttctgtggctggcttatttcactgagcataatgccctccagtttcatccgtgttgtagcgtgcgtcagaagcgcctacgttttagggctgggcgcagtggctcaggcctggaatctcagcgctttgggaggccaaagtgggcagatcacttgaagtcaggagttcaagcccatcctggccaacatggtgaaaccccatctctactaaaaatacaaaaattagctgggtgtggtggctcatgcctgtaatcccagctactccggaggccgaggcaggagaatcacttgaacacagaaggcagaggttgcagtgggccgagatcacgccattgcactccagcctgggagacagaacaggactctgtctcaaaaaaaaaaaaaaaaagaagaaggactcccttttttttttttttttttttttgagacggagtctcgctctgttgcccaggctggagtgcaatggcacaatcttgactcactacagcctccatctctcgagttcaagagattctcctgcctcagcttcccaagtagctgggattacaggcacgtgccaccatgccctgataattttttgtaattattttttctttctttcttttttttcttttttgagacggagtctcgctctgtcactcaggctggagtgcagtggcgtgatcttggctcactgcaacctctgcctcccgggttcaagtgattctcctgcctcagcctcccgagtagctgggattacaggaacgtgctaccaggccgggctaatttttgtatttttagtagagacagggtttcgtcatcttggccaggctgatctcaaactcctgacatcatgatccacctgcctcggcctcccaaagtgctgggatggcaggcatgaaccactgtgctcggccctggctgaataatatcattgtatggaaatgccgcatggtgtccatccgttctttccttgatggacacttgagtggcttcgtctcttggccactgtaggttgagctgctgtgaacactgtatacgagcctctgcgtggatgtgtgtttgaatttctcctgggcatatacgtaggagtagaattgctggatcatgcggtagctctccgttcgatggtttgaggaactgccagacgtgggttgtgtttttgcagcaagaactcattctgcagtttgccctgcagtgggtgttttgccgcatcagtcggcggtctctggcctacagcatggttgtggggcttggggggccctgctgtggtaggtggaggcaaggaggaacacctgccacctctaggcaatacacaaggaatttttttacataatgtgacatttttataccatcggactattggaaagcatttctttcttaagtttcattctctgatgcctagacaaaaatagactgaggaactgtaaaaagacactgaccatatttccctgaaagccaggcacttgagcattgcaattaactcttcttttttctctcctctgctgtcaagaagtaaatagaaactaacagctgagcagtttggatgtatgttagctgatgactcacgaagcattcacagccagggggccagctgctcttctgctatagaaagaaaacctattttggccgggcgcggtgattcacgcctgtcatccgagcactttgggaggccgaggcgggtggatcacgaggtcaggagttcaagaccagcctggccaagatggtgaaaccccgtctctactaaaaatacaaaaattatccggccgtggtggcaggtgcctgtatttccagctactcgggaggctgaggcatgagaatcgctcgaacccagggggcagaggttgcagtgagccaagatcgcaccactgcactccagcctgggcgacagaggaagactctgtctcaaaaaaaaaaaaaaaagaaaagaaaagaaagaaagaaaacgtatcttaagcaaaactgtaacctcatggatggcccagatgtaccagagccctgaagacaaaacccattttcacacagggctcccgccacagccccgcccatggccccacccactgctgccatgccctgcccccttaccaccagccccacccactgcccccgtgccctgcccccttaccacctgccccacccactgcccccgtgccctgcccccttaccaccagccccacccactgcccccgtgccctgcccccttgccacctgccctgcccactgcccccatgccctgcccccttaccaccagccccacccactgcccccgtgccctgcccccttaccacccatcctgcctactgccaagttccctctccccttaccacccacccaacccactgcccccatgccctccccctgctccatcccccactccatccactgccctggtgttccaccccctgtctcctgcccccatgccaggtccctgctccacccaccctgcccactgaccctcatgccccaccccctgtacaacccctgaccccacccactgcccccatgccccaccccctgtaccatgcctcaccccactgaccccgcattccaccctctgcccccatgacccacccctgcccccgtgttccacccctgtcccctgcccccccaccgtgcccaccccctgctccacctgccccacccactgcttcactcatcccgcccactgcccccatgcctgccctctgctccacccattccacctctgctctcctgccatgctctcccggtccctctctgcacaccctacccgcacctgctcatccccaccctcagcagccggagctgtagctgctggacaggtaggggaggtctgggtgggcccgggtgagcccatgggaagtgtgagggaccaaggagacccctcaggtgtgtgttcacagatcccagggtgatgaggctccaacagcccaggagggcgtgtcctgcatggccggaggagctgggggtgaggactggggtggacagggcctcacacaaggctggacacagatccccttggcctgtacctggggagggtagcgctgatccctgggcaggctgtggctcgggcctccgcagctccacatggctgctgcctgtcctggaccccaggcatccacaccgcaggctagctgttctccagcctccaaggctcagaccctgggtgtacacaccacactccagtggacacttggagtgtccagcctctaaggcttgtgtccttgtgttcttgccccacctcctgccgggtttctgcccctgatggttcacaccaggcggacccgagtagagaagacgggatgggtctgggctcacatgggtgcgctatcgtttctgttctggaaagttccagcaggacctcaccaccccgctgttcccgcctggctctacagttcagagctgccagggttcccactcaggctctagagcttgaaaacccctcagtcgtcagggggagggatgcaggctaaacgtacaaacttcaattggagccggtgctgcagttgttggtggccgaaggccacccgttctgagccccgtgccagctcctaacctggtcacggcccccgcagcagcctgcatgggcagcctcccccatgtgcctgctgtggggagaatctcgggttttgagtggctcaagcaggaccagcttcaaggagtgcggggggagtattgctccctggtctcagcccagacccctgcctggggaggtcagcagctgcgcctgagggtgaggtggggctgccagaaggagcaggacgctggaggggaggacaagaaggaggtggacggacagggacccttcaaaaggtgccacttttcaaagccagagcaggcacggccattccccagggtacaagggggacccatctgctcctcccaacaccacagcagcttcgcttaggatggaggtgacgccgcaggctggtgggaagagatggccccaggtccctgcagaggctccaccggctgcgggcagccctgaggcggccagaccccacacaggccgacaggagccacgtggaggacacaaaggctcctgccggctcagctacgccccctagttagggctgaccccctcttgggaacacctgtttctgtccgttcgtgtctttaatccacgtcccacctggcgagtgttgtgggcttcattttgcatacttggaggtcagagggagtgagaaatttggctggggtggaatcctgactccactcctcccagccgggttgccaagtggtttgggcagcagggccccctctgggcctcagtttccccgtgtctcgagtgggagcggctccttgcacctgtgaggtgtttaccgctgccagcgtaggtgctgcccagttatatcagttgacatcggctgttgggtggagcctcagttctgcgcccgttaccctccaacacccagggtgtgcgcattacccaagcccgcagagttttgtttaatttttggtgattgcagcacggtagccaaactcatcctactcattagcatatcctgggcatctcagggagccacaagaggaaaatgtgccacaagttccacgaccaccctgggccatcctgggcacagcagacactattttttttttttttttgagacagactctcgctctgtcacccaggctggagtgtagtggtgcaatctcagctcactacaacctccaccttccgggttcaggtgattctcctgcctcagcctcctgagtagctgggactataggtgcccgccaccacacccagctactttttatatttttagtagagacagggtttcgccatgttggccaggctggtctcgaactcctgacctcaggtgatctgcccacctcggcctcccaaactgctgggattacaggcacaagccactgcacctggctggcagacactttctgagtgcaccaggctctgcggcggtgtcgtgggggcgccgggctctgggtgggggcaccaggctcggtggcaatgtcacgggatccttggggtgttgcttcgccagctggaaacctctgtggccagtcgcacctttgcccaagtttttactcaggcccactgggctcattcagtgcacttggcctgacaggctgtgctcagctcatgctactggtatgaatctcacacctgccaggcatggagtggcgaggggtgtgtgagggagaaatcgtgaggtctggccactgcgcacagccaggcacaccggctatggtagagcgggccatttcgggtgccactgggggcgctggctccctgcgaggctgcagctggaccaggtgcaccatgagcaggttccatggctggcacgggggaatgcaggggcacccagaaacttggagacgccgggagccgcagagcctcagagacggtgtcgcaggcctggctggggaggtcttaggtctgggcttcccgaagggacacagctcttctctccctctctcttctctccttcttgtcactcacaacattgttagcaagggacgtgtttcagccctgtttgtgtgacagctcttttagccctgccatttggcaggtcacgagttcttgtcttgcatccaggaagaatgaggtatgggcacaagtagagggtgagcaaggccagcaggaaatttactgagcaacagaacagctcagaggagactcgcagtgggtagctcctccccgcaggcagggcatcccagctagcgttcagctctcagaagagaggagaccctggaatgggtagttcctctctgcagctggcagtcccaatgtctgctcagctctcagcagagaggggagcctggagcaggtagctcctctctgcagctggtagttccagcatctgctcagctctcagcggaggggggaccctggagtgggtagctcctctctgcaggcaggtcatcctgtcatctcctcaaatctggctgagtctggggttttcataggcttcagaggggaggaagtgcatgctgactggttcatgggcggccatgggtgggcctggacaaagcactataagttcccattctggtccctcagcccagctcccaggcttcaggccatccctggcttcagggtgggccttcactgtggacctgcccctttccacccaagagcctctctgcctcctgccgtcatctatggcgtccaggctgattgtgccaaggagctgccctcagccccttctcagccatggttgggaagctgcacctgcacccaggaggatggggttcctgcccactcccacccccaagagcaaaggaatgcgcagatctggaaccatggctgggcagctgccactgaacctggggagcacaaggctctctccctgctggcttggaaggtgggtggcttctgcctgttcctggctcccaccagctccgtggagcacgcagccccggcgccacctccccactgctgctggtgtcatgacagtgactgctccagacaggccgccgccatctgtgcgtgtcacatatctatgcagagactgctgcagacaggccgccgccatctgtgggcgtcgcatgcccatgcagagactgctccagacaggccgccgccatctgtgggcgtcgcatgcccacgcagtgactgctccagacgggccgccgccatctgtgggcgtcgcgtgcccacgcagagactgctccggactggccgccgccatctgtgggcgtcgcatgtctatacagagactgctccagactggccgccgccatctgtgggtgtcgcatgtctatgtagtgactgctccagacaggctgctgccgccatctgtgggtgccacatgcagagtgacccaggggcttgccacaagggggacagtcaggcagggactctgtgtgcacatgcatccaagcacaaggcaggtgtgggcagagaagcgagttggagccatcctcaggaggagtgaattactggggatgttgaccttgggacaccaggaagagaatctcatttgcagaggaggaaaacgctgctggaacggaaagtctgagaaagacagcaagagcaggacagagcaaagcaggacgcgggagtgaaggcctgcagtgtgggtgcgtgtgcaagacccagaaacgcgcagatgtgtggggccagcaacaccacggccacatcctcagccacagaacaacacacaacatctcaaggatgaactcatcaacgcaccaacggttagtctcttatctaataaataaagcatatcccggttacaaataatcaacacagatgtttcaatgatcttgagtagaaagttgagagcttgtcatttgagtcaggaaatgggactccgcggaaatgatggccttgagagagccctcatgtgttctttgtgcagtcggcaattccatgtagacaggaaaaatggactgaaaacttaaactgatatgatgaagataatatcattcaattgaaaatgaaaatggaaaaagtcatttataaaccatttgaatggacaaaaaagaaaattggttaggaattaaattagctagatgaaagtcactttttttcttttttgcttttttttttgagatggagtctcacactctattacccaggctggagtgcagtggtgcgatctcggctcactgcaacctccgcctcccgggttcaagcgattctcccgcctcagcctcctgagtagctgggattacaggcgtgagccacagtgcctggccaaaagtcactctttttttttttttttttttttttgagacggagtctcgctctgttgccaggctggagtgcaatggagagcagtggtgcgatctcggctcactgcaagctccgcctcccgggttcacgccattctcctgcctcagcctcccgagtagctgggactacaggcgcctgccaccacgtgtggctaatttttttgtgtgtgtgtgtttttagtagaaacaggatttcaccgaataagccaagacggtctcgatctcctgaccttgtgacccacctgcctcggcctcccaaagtgctgggatttcaggcgtgagccaccgcacccggcccaaaagtcactcctaaaaatgctttctcggccgggcacagtggctcatgcctgtaatcccagcactttgggaggccaaggcaggcagatcgcctgaggtcaggagtttgagaccagcctggccaacatggcaaaaccccatctccacaaaaacacaaaaattagccagtcatggtggtgtgcgcctgtaatcccagctactcaggaggctaaggcaggagaatcgcttgaacctgggaggcagaggttgcagtgagctgagattgcaccactgcactcccgcctgggcgacagagcaagactccatctcaaaaaaaaaaaaaaaaaagtttctcaacaaaaacttaacggtggcatagttctgatgaaaatcttcatgttcatggcatggagttaaaatgtccaaacggtcaaggccacagattaaaacagggacatccgcaggccctggcccgaggggaggagcatacagggagtggttcacccactccaccgcctttggagcaccttttaattctctcactcttctctaatgtgttccttgatttatctattaccatctgcggattttcatctgttcttttttgccttttttttttttgagacggagttttgctcttgtcacccaggctggagtgcaatggcgggatctcagctcactgcaacctccgcctcccgggttcaagcgattctcctgcctcagcctcccgagtatctgggattacaagcgcccgccaccacgccccgctaatcttttttgctttttaaaattatgaaatgcggtatacacacagaaaagtgcgtgaacacacacatatgtaccatttaatagatagttataaaatgatccgcccgcctcagcctcccaaagtgctgggattacaggcgtgagccaccgcttccggcctcaggagaggattcgtgtttgcttctcccaacgtccagggaagcgacatttcctatttgctttagactaaaatctatacttgaattttttgtttactgtaggtaatattaactagggttgcagtccgtggagggccgactatgcgaacggtttctatgaaccatcctttgctgaaggctgaaacctcttcgtcccctgggagagttcctattcaggccttcttgtagttagttcatccttgtgttgacagctgtattagggttctccagagagacggatccagtaggatatagacgtagatccaggacaggagatggactgggggagctggcgtttgcaattacggaggccgagaagtctgtgagccggagaccccgggactcgggtagccgggctcagcccaggtcggaaggcctcagaagcggggaagcggatggtgtggccctcagcacgacccaccccaaatcatgccttgccaggtttctgggaattcctggtccagcccagctggcacctgacactggccgtaacggcagggccactgttagctgttagcctcagggccccaggtttaggggcggtgtctccgttgcacgtgcaccccgagcgcgcccgccactccccacatcaggagctctgttcctcgggttcagcaaacgcccgggcgaaagcaatcttaacattctgggctcccggcacccagaccttgggctgatgccccttgctagtgggtcagctctttagaaaatatattctaactatttccatcagcatttccacttattttgtgcaggagagttgaacccaaaccgtctgggtcggggtcggtcaggccccgccccctgacgtcatctcacccccacccaatcccccgcgcctacctgcctcccggcccctccccttcccgcccctcaatcccagcgctcatctctgcggccacgcccgccccttcccgccacccaatcctagcgcttgtctctgcggccgggccccgcccccacccgccccccgcccaatcctcgcgcggactcatgtttgcccgctcggccgccgtctctcgagtctccgccagatccggggcgggtccgcggccgcggcgggaacatggaggagctcctgaggcgcgagctgggctgcagctctgtcagggccacgggccactcggggggcgggtgcatcagccagggccggagctacgacacggatcaaggacgagtgttcgtgaaagtgaaccccaaggcggaggtcaggcagcgggtcgggcgggccgggggaccggtttctttccggagagggtcgcgggcctcggcgcggggcgcggcctgggcttctcccgccggaggccgtgggtggctctcccgggactgccgccgccgccccttgcggggaaccctttgcgcggggcgagcggtgaacgggggcggcggaagcgtccggggcgtccggaggagtttgcacctgcggggaactgtccggagcaggaaccgcggccgccccacacctcctgttctccgtgaactttctctcgggggcgctacgtgaaatggggcgggactggctgctgcagtcttgctcccggggttcctgccctgcggtgctggttaagtggggtcgttctagccggggaagctgcttaagtcctcagcttaagtgactctggaggtgtccatcccccgtgagcctcggtcagtacgttgtgaaacggggcgaaggtgctgcccccaggccagctgctgcgcctcaccacaccctggcatgctctgtccttctgttagactcattctcgggccgggcgcggtggctcacgcctgtaatcccagcactttgggagacagaggtgggtggagcgcgaagtcaggagttcgagaccagcctggccaacaaggtgaaacccccgtctctattaaaaatacaaaaattagctgggcgtggtggcgggcgcctgtaatcccagctactcgggaggctgaggcagaagaatcgcttgaacccaggaggcagaggttgcagtgagtcgagatcgcgccactgcactccagcctgctgggtgactgaatgagactccgtctcaaaaaaaaaagagtgttcctagcagcggtgacatggcagctgtggtggggctctgaggctgaggaggtggggactctgaagaactgaaagaaggatgaagacagctggaagtcaggagcacgaggagagtgtgtgtgtctatgtgtatgttgtgtgtgtgtacgttgtatgtgtgtatgtttgtaatgtttgtatgttgtgtgtatgtattgtgtgtctgtgtgtgtgtaagggtggagccccaggtgaggatgggagagtgggcagggcagtggtgtgtgtctcaggagaaaaagaaaggccgctggccctgacctgttctgcggggatcactgctgtgtatgttgtgtgtgtgtgtctgtgtgttgtgtgtgtatggtgtgtctgtaagtcgtatgttgtgtgtgttgtgtgtctgtatgtgttgtgtgtgtgttgtgtgtctgtatatgttgtgtgtgtgtgttatgtgtctgtgtgtgtaagggtggagccccagatgaggatgggagagcaggcagggcagtggtgtgtgtagcaggaggaaaggaaaggccgctggctctgacttctactctagggatcactgctgtgtggtgagccagggggacccaagggaggagttgctgtggtcccggggagttggatggaaacggcatctcaagatgaggtggtttccagtgctgggcaggaggtggcatggaacttggtggtctcttcaggtgaaaagtgaccccaggtcactggcataggcagccagggtgccgcctgcacctgagaggtcgggtgagtctgtgtcctgtaggtggaacaggactgcagttgaggtgtcgtctgaggacactgacaggtaacccatgttcacagtcccactgttgccggatcttagtggaatattagtgccttcgattttcctctctccagagaacctcccaattcaaccacagcacacaagtgtagtccaacactggaaagctcaagccctcttcttccagtacagcctctgaacctgtagcctaccctgttggcaagtgtgtttgaaaacactgtccatgtgtatggaatcctcagtcaggatagtcttggtttgaagttgtaatgctagaggaaaacatatctacagaaccttccggaagtaaccttgcctccctgtatttccacttcctctcgtatttttctgacaggccagaagaatgtttgaaggtgagatggcaagtttaactgccatcctgaaaacaaacacggtgaaagtgcccaagcccatcaaggttctggatgccccaggcggcgggagcgtgctggtgatggagcacatggacatgaggcatctgagcaggtgcatcttcacaccaccccccacctggctttattacctgagcaggtgtgtcttcacaccttgttttattatgtgtgtcttcacaccacccactggctggctttattatctgagcaggtgtgtgttcacaccaccccccagctggcttcatgccccgccccggctggctttgttatctgagcatctgagcaggtgcaccctcacaccagcccccagctggctttcttttccaccaagtggttctctgatgactgaagcttgtactggggacatcattttgaggagtgtaatgcaaagaacccgtgactccacataccatgagttctgcagaatgaacggcaggcactctctgcaaccaagggcagaagcaagaggaatctcccaaagtgagatgctgaccaaaggcctcgctgcacgccggccgcggtggctcacgcctggaatcccaacacttcgggaggctgaggcgggtgaatcacttgaggtcaggagtttgagaccagcctggccaatatggtgaaaccccatgtctaccaaaaatccaaaaattagctggatgtggtggcaggcgcctctaattccagctactcgggaggctgaggcaggagaatcacttgaacgcaggaggcagaggttgcagtgagctgagatcgcaccactgcactctagcctgggcagtagagcgagactcagtctcaaaaaagaggaaaaaaaaaccactgcaaacttggatgaggctgggaaagatcgtcaaataatcaacacctttatccccctcttgcttcaccagaacctactttctgtcctcaaaatgtccgacctactagccggctgtggtggctcacgcctctaatcccggcactttgggaggccaaggtgggcggatgacttgaggtcagagtttgagaccagtctggccaacacagtgaaaccctgcctctactaaaaatacaaaaaaattagccaggcatggtggcgggcaccagtaatcccagctactcgggaggctgaggcaggagaatcgcttgaacctgggaggcggagcttgcagtgagccgagatcgtgccactgccctccagcctgggtgacagagcgagactccatctcaaaaaaataaaaaagtttgaccctctttatgtgccctgagactgagcagtgggtgtgttgccattctgtgtgtcatctgtttagttgctgtcgtttgatttgacagtcatgctgcaaagcttggagcccagctggccgatttacaccttgataacaagaagcttggagagatgcgcctgaaggaggcgggcacagtgggtatggcactgcgcgggccacgggtgctcccgcctagaggaggacgttcagccggtgtgggctcagagcgggggccgtgcagcagccgtgggagggtcggacgtgggctgatggcagagcaagggaatgtcggccttgagccgcatctcacggtgcactgaacacagtgactgtgatgcgtctgttgtgtcctaaatgcatttgaaagatgaaaacatttgctggacacaagacacccctagtgttacagttacttttacctctcgttccccagaagagtgtaagcagaggctctctggctgtctgtaaaaggcaagacctttaacccagggtctgttcctgtaaaacagtcatacttgaggctcagaattacagccatcatgtctgacctttccagagcataacgcgctgtcaggatcgagggaattttccggtattttaatctgctgacatttggaatccgtgtgcagcccacatggtaaatgtggggagatttgctgatgatcggaacagatcaccaggggcctgctgtaggagacggagacatgctgttagtctgttctgtgagggtccatgacggatccacccaggcggcctgtgtggtgaggatccactgagaggcctcccaggtcgcctgtcctgtctcttccagtcttaacggagtttagtccattgggattttccttgaattagggagactgcagaggagtgagattctttctttctttctttcttttttttgagacggagtttcactcttgtcccccaggctggagggcagtggtgcaatcttggctcaccgtgacctctgcctcctgggttcaagcgattttcctgcctcagcctcctgagtagctgggattacaggtgcatgccactgtgcccacctaatttttgtatttttagtagagacggggtttcaccatgtaggccaggctggtctcaatctcctgacctcaggtgatccacccacctcagcctcccaaagtgctgggattacaggcgtgagccactgcaccctgcctgagattatttcaaagcacaatagtttatctgacacacatggcaccaggtttgccactgagagccatcctttctgatggattgggggcagattctttttcctctttatttatttatttttattttatttttttgagaaggagtcttgctttgttccccaggctggagtgcagtggcatgatctctgctcactgcaagctccgcctcccgggtccacgccattctcctgcctcagcctcctaagtagctgggactacaggcgcctgccaccacgcctggctaattttttgtatttttagtagagacagggtttcaccgtgttagccgggatggtctcgacttcctgacctcgtgatccacctgcctcggcctcccaaagtgctgggattacaggcatgagctactgggcctggcctgttttttactttttatgttttttatgttttgttttgttttgttttttttgaaatggagttttgctcttgttgcccaggctggagtgcagtggcgcgatctcagctcaccgcaacctccgcctcctgggttcaagtgattctcctgcctcagccttctgagtagctgggattacaggcatgcgccaccatgcccagctaattttgtatttgtagtagagatggggtttctccatgttggtcaggctggtctcaaattcccgacctcaggtgatccacctgccttggcctcccaaagtgctgggattacaggcatgaaccactgtgcccggccatttttatggttttttttgagacggagtttcactctcgttgcccaggctggagtgcaatggagcgatctcggctcactgcaacctccgcctcccgggttcaagtgattctcctgcctcaacctcccgagtagctgggattataggcgcctgccaccatgcctagctaatttttatatgttcagtagagacagggtttcaccacgttgggcaggctggtctcgaactgctgacctccggtgatccgcccacctcagcctcccaaagtgcctttcctctttaagaacatcctcccctttgtttcctgacacagtgtggtcttcccccacacccccgcgtgttgggatgtgagacaggtcccctgagaggtgcccgcaggctgcctgtcctgtgtgtgtcctctggtgcccctgctcgggagcagctagtgtctttgatgctgacgtctgctggaggccacaggctcctagtgtttttgatgctgacatctgctggagcaggctctgttaggggtgttgtgtgagctggtggagacccaggccctgtttgtctctggcaggggcataagctggtaggagctcgctgaggtcgtgtctgaaggtgactcagtttcgagagtgggcgctgggatcccttggaactaatttcctttcttttacttttgcttgcaagggagaggaggtgggcaggaggaacggccctttgtggcccggtttggatttgacgtggtgacgtgctgtggatacctcccccaggtgagtgcacggcgtttgcttctatttcacaatcaggtcagctgttcagacacacgggttggggggacacacccccctcctttttttgtgagcttcagtaaaagtatttgcaccattttttctttgctgatgtttgagaggttgacgtaagattgacccacctaatatgctaggtaagcatgaagaaactgaggaggaccagcaagttaggagctggatttcaaggtgggtaaaaatgagggaatttaacaaatgttttaggtatactaaactctcaaagagggtggaatgacaagggtttgtcacttttggttgtgtgattttatggtggcttccctccgcatttccacctggggagttctgcttgacgcccagcacatgtgcagtggacagggctcctgtcctgtcctcgagaggagggtacagatgaacccagaaaacttgccagggtttcctggcgggcgcgggggcagtagaaagactttgaaatgttgaagtttgttcagaaacctgcttaggggcggggagtggtgccctctggtcctgcctgctggcggggggtggggggttttcgccagctccgccccttcgtctcgtggctgtactcacagtgtgtgtgtgcatgtgtgtgtgtgcatatgtgtatttgtgtgcacgcacgtctgtgcgcatatgtgtatgtgtgtgcatgtgtgtgcatatgtgtgcatgtgtatgtgcacgcatgtgtgcatatgtgtatgtgtgcacacgtgtgtgcatgtgtgtacgcgtgtgcgcgcacatgtatgtgtgcaggcgtgtgtgcgcatgactgtgtgcctgatgcatgatgttggcgtcgtgtgctactccagtcgtgtgtgtctgtcttgcttccctcctgggtggtaagcacctgtgacctggatgtcctttctcggggtccttctcaatggggctccatgtgacttttcctgtcatcactgtctggggaggggctgtctggacagatgtcagaagtgagccatggggttggggcaggtcagccagctctggcctcagtactccagtgtgattgtaaattaagaggaaatgttagccagttgctttagcagcaaaaaaaaaatttttttttttaaataaaaaagccctggtggttcatgcctgtaattccagcactttgggaggccgaggtgggaggattgcttgagcccagcagttcgagaccagcctggccaacatggtgaaaccctctctctagtaaaaatacaaaaaattagcagggtgtggtggtgcgtgcctgtagttccagccacttggaaggctgaggtgggaggattgcttaagcctgggaattgaaggctgcagtgagctgtgattgcaccactgcactccagcttgggtaatggagcaagaccttgtttcacaaagatgaaaaagaaagaaaatgttctggaccgggcacggtggctcacgcctgtaatctcagcactttgggaggccgaggcgggcagatcacgtgaggtagagtttgagaccagcctgaccaacatggtgaaatcctgtctctactaaaaatacaaaaattagccgggcatggtggtgcgcacctgtaatcccagctactctgggggctgaggcaggagaatcgcttgaacccgggagacagagattgcagtgagctgaaatcacgccattgcactccagcctgggtgacaagagtgaaacttcatctcaaaaaagaaaaaaaaaaagtaaaaagtaaactaaaaggtagtacagtcagatatcttctgttacatatggaacctgtaaaggccaaaagtgtgctgcatgtgtgccaaccagagcacgagggagcaggccccatggcaccctgtgatgtgagtgtgacttgggacaacgatctttatgggcagcaacgtggcaatgcctatcaaaaaaaaaattttttttttgagatggagtctcgctctgtcacccaggctggagtgcagtggtgcgatcttggctcactgcaagttccgcctcccaggttcacgccattcttctgcctcagcctcctgagtagctgggactacaggtgcctgtcaccatgcccggctaatttttttttgtatttttagtagagatggggttccaccgtgttagccaggacagtctcaatctcctggccttgtgatctgcttgcctcaacctcccaaggtgctgggattacaggcatgagccaccgtgcctggccaaaaatttaaaatttagttttaattttaattttaaaagatagagtctctctctgttgcccaggctggagagcagtggcatgatcatagctcactgcagcctcaaactttctgggctcaagccatcctcctgccccagcctcccatgtagctgggactacaggcatacaccaccacacttggctaattttttaattttttttgtagagacaggggtctcactatgttgcccaggctggtctcaaactcctgggctcaagtgatcctcccacctcagccacgcaaaatgctgggattacagatattgctcaccactcccagccccctttcaaattttttaatttatttaatttatttttttgaaatggagtctcgctgtcacccaggctagagtgcagtggtgcgatcttggctcactgcaacctccagcttccgggttcaatcagttctcctgcctcagcctcctgtgtgactgggattacaggcgcccaccaccacgtccggctaatttttgtatttttagtacaagcatgagccaccacacctggcccccctttcaaaattttaaatggacttatgctctgacccagtaattatcctttaggatttattctacaggcatatttacacgtatgcaaaatggcacagacacaagggtatttgctgtgccactcttggtactatgacaaggaaaatccagaggagcactgggtgaagtcctggtgcatcatctgatgaactattgtcagctgctacaaaacaacgtaaagaaagtgggagcagggccaggtgcagtggcccacgcccgcccgtaatcccagcactttgagaggctgaagcgggcagatcacctgaggtcaggagtttgagaccagcctgaccaacatggcgaaaccccgtctctactaaaaatacaaaaaaattagccgggcgtggtggtgcatgcttgtaatcccagctacttgggaggctgaggcaggagaattgcttgaacccgggaggcagaggttgcagtgagccgagatggcgccactgcactccagcctgggcaatgagagcgaaactctatctcagaaaaaagaaaaagaaaaaaaaatgttctagaagccttcattcttggaaggctacagagtgggtcctgaagcatccccatgcttcccactgctcttgggataggatctgaggtctcagcatgtccatgagactccggttcctcctgggatgtggttcccccctcaggctcctgtgactgccacccctcccacgtgccgctcctgcagccctctccactttgagatgcttgtgggtagctgagctctcccttggttctggcattttccagtgaactgtgcttttgctgttactgtgcaggtgaatgactggcaggaggactgggtcgtgttctatgcccggcagcgcattcagccccagatggacatggtggagaaggagtctggggacagggaggccctccagctttggtctgctctgcaggtgagtggggccccactgcatgcccagcacctgccacacaccccacttgcctgaggtaggggaggcaccaaggcaggtgaggccacctctgagtctgattctgggtgggaagcgggtgcctggtggtgtgctatccgctgctgcctgggctgggggcggtggggacctggagcggcgcccctcatgcacgcgttgatcaatttgctgaggctccattttcctccctgcagttaaagatccctgacctgttccgtgacctggagatcatcccagccttactccacggggacctctggggtggaaacgtagcagaggattcctctgggccggtgatttttgacccagcttctttctacggccactcggaatatgagctggcaatagctggcatgtttgggggctttagcagctccttttactccgcctaccacggcaaaatccccaaggccccaggattcgagaagcgccttcagttgtatcagctctttcactacttgaaccactggaatcattttggatcggggtacagaggatcctccctgaacatcatgaggaatctggtcaagtgagcgggccttactctggaaggaggcctcagaggtttctccacagtcctcttctgggcaaattcttgtttcttcacatgctggactagcttaagaccaatgcagtagcttatttccaagccttgcaaagtatataatatctaagaggaaaggttttgtcatcccagcgttgtccactttgtggggctttgtaggtagacggagccacactacaggcagggtatgagcagagggatgtatggagtgtgggtgactctgagcctcactgctgctgcaaggtggggaaactgtaagtgaacccctgtgggtgcgggggagggtatccggtgcgcagggaggtggccagcgcccccgggcactgctgctcataggtacctttccactgcctcctccctgctctcctgtgcaggaatgtctctgagctgttcacgttgatgcttcttggttggcaagacttgggtgtagacatgaaaccatcttactaaaagcgtcttaaaatgaccaattccagaatcaagcgtattccgttttcttcctgcatgatccctgggccctcccgcaggctgagcaagtctgtaaactgattctgggagaaaccaagctgctggccatagggtgtccttgggtacatccaggagtcttcattgcttctgttattaccccgtctcctctgccattttctacagcttgctgagttgtcattcctttgcaacattaaaatacatgctgaactcatatttttccttccttcactgttgtagtaaagagacatatttcatgaatggcattgatgctaataaatcctttgcacaaaaatttgaataaacttccagtggtttcgataacgtacaagattgtatatttccctcatttattgtaattcaatatcttagttgtttgctgaaaaacttgtaatattttgtgacaaacaggtacaactagtgtttttgttgttgtttttagagacggtcttgttctgttgcctaagctgcagtgcggtggcatgatcatagctcactgcagcctcaaactcccaggttctagcagtcctcccatctcagcctcttgagtagctggaactacaggcgtgcaccaccacacccggctaatttttgtatttttagtagagatgaggttttgccatgttgcccaggctggtctcaaactcctgagctcaagcaatcctcccaccttagcctcccgagtgctgggattacaggcctgagccaccatgcctgacccaactgttctttctttctttcttttttttttttaagacagagtctcactgtttccaagctggagtggtgcaatggtgcgatctcagctccctgcaacctctgccctccgccttctgggctcaagcaattctcatgtcgcagcctcctgagtagctggagtagtcggtgtgtcaccacagtggctaatttttgtatttttagtagagacggggtttcaccatgttgcccaggctggtctccaactcctgacttcaggcaatcaacccgcctcagcctcccagctgtttcttttttctttttctttttgagatggagtcttgctctgtcacccaggctggagtatagtggtgcgatctcagctcactgcaacctctgcctcctgggttcaaggattctcctgtctcagcctcccgatgtagctgggattacaggtgtgtgccaccacacctggctaatttttgtatttctagtagagatgggattttgccatcttggccaggctggtcttgaactcctggcctcaaggaatctgcctgccttggcctcccaaagtgctgggattacaggcctgacccaccatccctgacccaactattgtttcttaaaaaaaactctttttaaccttgcctttttgttagggtagaaggatagctcagagcttcaaagagcaggactagcctaagaactgtctgtgatatttgaccagaggtgcagcctagctgccattcttcctcaccctgtggaagacattaaagggagaatgaaagtagctgtagaattacctttgggggaagaagccacttggtgaacttggcaaacacccgtgtttgaggggtcacccagggtgtcatgagctgggccggaggggatggattgattacttgtcttgtttgcttgtttctgttgtaagtcagggcccctcagcagaaggcagaacagaaccgagttcctttagaatgctggtttttgtgtggagtgaggaaggaccgtgagtgtggtcagtttccaacctgacaggacctgctcccgttggccaggactgcagcttgttactttgaccctgggaagaaggtaagtgttcccaagaaaagggacgtcccaaagcggcgccatcccgatggcacgtgtgctgctcgactccctgccgggtaggtccatcctgacggcgcatgtgcccctcagctccccccactgggtaggtccatcccgacagcacctgtgctgctcgactccccccactgggtgggtccatcccgacagcacctgtgccgctcgactccccccactgggtaggtccatcccgacagcacctgtgctgctcgactacccgccgggtaggtccatcccgacagcacctgtgcccctcacctccctgccagacggtgcgtgtgccgcttggctccccaccaggtaggtccatcccgacagcacctgtgccgctcacctccccaccgggtaggtccatcccgacagcacctgtgccgctcacctccctgccgggtaggtccatcccgacggcgcgtgtgccgcttggctcaaggccctgacatcgttccactcagcacagcatcaggtgcccgggacccgggacatcatcgttctgtgtcagcacatcaggtgcccggggcccggacatcatcgttccactcagcacagcatcaggtgcctgggaccctggacatcattgttctgctcagcacagcatcaggtgcccgggaccctggacgtcattctgcatcagcacaacatcaccagtgacgagagcctccccaagtggttgacgggaaggatggttcggtcctccagaggcggtggccttctcttcctcgatgacattgccgggctgcaccttgtgagaggccgtcgctgagagtgcagccaaatggaaccatcaggaggggtgtctcgggggtgtcgaaatggtaaacagtagtgggtagttttcagattttgcaatgctgcggtatgtgtcagctttttattttttattttcttttttatttaattttaatttttcttagacagtctcactctgtcacccaggctggagtgcagtgacatgatctcggctcactgcagtctccgcctcccaggttcaagggattctcctgcctcagactccccagtagctgagattacaggcacctgccaccatacctggctaatttttatatttttagtagaaatggggtttcaccatgttgatcaggctggtctcgaactcctgacctcaagtgatccgcccacctcggcctcccaaagttctgggattacaggtgtgagccgccgcatctggccccgtgtcagcattttaaatttgtaagttgatgcaatgcttattctaaaatatctaattttgtattattataatatatgcatgttatatatttttatatatacacactttttcataaagggctatcaaaatcctataggcttcaggcacaatagatgcccttgcatctactcagagttgattcttctggattattctgtccatgagagaccatatgcatgtcatcagaggatgaacttctcatccaaagctgtgctgttttctgggctggctcagctggaagagatgggggaggggataggttctgatttggaggcatagttttttgttttttgtttttgaggtggagtctcactctatcgcccaggacatctgggagtgcagtggtgacatcttggctcactgcaacctccaccctccgagttcaagcgattctcctgcctcagcctcccaactgggattacaggcacctgccaccgtgcccagctaattttgttttgtatttttagtagagatggggttttaccatcttgggcagtctggtcttgaactcctgatctcgtgatccacccacctcagcctcccaaagtgctgggattacaggcgtgagccaccacgcccggcctggagacatggttttaagggacagctgtgtgctatgtccttgcaggctgctgtgttgacatctgaaagcacagagggactgggctctggacacagctccgagactcctcggtcaagggaacagctggaagaggtttgttctctttgggcagccgtgaacatcgctaggacctccggggaggaagtccagggaaatggtagttgccctgagctcccatccaggactctcagttctcatctttgggatcttgggggcaatgtggctccactttttatttcttactgtaagtgggattatatcaaaacacctaatctaacacagtcagagcgtcagcttttccacagaagtgaatctttagatacctgaagacaagccttctgtcccaaagcgttttacttttcatccttttaatgaaagtgcgcctaaagcggccaggcgcagtggctcacgcctgtcatcccagcactctgggaggccgaggtgggcggatcacctgaggtcaggagttcgagaccagcctggcaaacatggcaaaaccctgtctctaccataaatatgaaaattaactgggcgtggtaacgtgcgcctgcaatctcagctactcgggaggctgaggcaggagaattgcttgaactcgggaggcggaggttgcagtgagccgagatcgtgtcactgcactccaacttggagacagggcaagactccatctcggggtggggaagacctgtatcttggaaagatgatgtaggggtgcactgtaaggggtatattggagggggaattccaggcagcagggagagggctggcgggggctttcctgtgagtgggtaagcaggactgtgagaagggcaaaggcccaggagccatggaggggccaggacagggtggtgagagagagggagcagtgccaccggcttgtccacgtatttcactgaagcctgtgccacgtctgcacatcccacctccacccatccacgcctctgcctgaaccactccattaaccagctggcctctgcttggggtggcccaggggagccgagaggagatggggagggtgggtgaggttaggatatcattctcagacttccttcatcaagcccacaccccaggcctgggtggcgccagctctgtagccaggctcagctctgtcctgtggtctccccacaccctgcccatgtctgtgccaggcccctttcttgggtcctccttgattcctccagcttgaggtccacatcccacctttactccgtccacgcctctcctctgggctgatggtaggatcacaagcatgggtggccccgacacctgaccagcaccgcagaccaggccctgtactaagacatccaggcagatggggaaaaagatgggtggtaccactcccagaacgggaaaccggacagagggcaggttctgttttgtttgtgacggagtcttgttctgtcacccaggctggaatgcagtggcgtgatctcggctcagtacgacctccactcccaggctcaagcaattctcctgcctcagcgtcccaagtagctgggattacaggtgtgtgccaccatgcccgactaaaatttttttgtatttttcgtagagatagggtttcaccaagttgatcaggctggtcttgaactcctgaccttgtgatctacccacctcggcctcccaaagagctgggattacaggcatgagccactgcaaccagccgatacaggtcgttttaaaaacagtattatttgcacaccatacaatttactctactaattctctaagaaacttgggatcacttaactgccctgcccttgaatcttcaacagctcttaaccccccacatagaggacttcctagcctggtgcctgcatatctgtttcttcattcaggcacctcttctcactgagagacctgagcactcgtatggttctctgtgtgacgcctaatatctgactgtagactcatgagttgtatgaagaaaaattacaaggggctttgaggcagtaacagagaggactgactctagaccacagtgttggaattccaaaaaagagaaccaagaatacagagggagaacgccatgaagggctaaaagctgtcccaggattggaggacccaccagtcctgttcaggggatgacaggagactcaccctgacacctccctggggaatttttcactggtgtcacagagaagaccctaaaagcctgcagagatagaacagtttccacacaaagaataagaactgaaatggccataagcttctcaacatcaaaactggagctggcagcttcttggttcctaaagaacatggtctgatctccaagctggaatttgatacccagccaaactgtcaactaggaagaaagaaatttacagacgtacgagagctcacactggcctgtcaggaaccttctgtcaagatgcgatagcagggtgggcttcagatgagaaaaagccagggactggcacatgccctttctgcagacaccacagtcatcctcctgtcctacctgctgttctgcggcagccctgccactcctgtcaagaggtggctgcttggccgggtgccatgtgtaatcccagcacattgggaggctgaggcaggcggatcacctgaggccaggagtttgagaccatcctggccaacatggtgaaaccccgtctctactaaaaatacaaaaattagcggggcgtggtgacgcgtgcctgtaatcccagctactcaggaagctgaggtaggagaatcgcttgaacccgggaggtggaggttgcagtgagccgagattgcacttcagcctgggtgacagagcaagaccctgtttcaaaaaaaaaaaagaggtggctgcggatccccttgccttgattgcggctttggagaccgatggaaggaggtggaaatgatggtgtgtggcttctgaggccaggtcagaaaaggcctttgcttctgccagctctctgggagctctggctctcccagtgctcactcttggaacctggcctccatgttcagggaagctcaggccacaccaggaggccacatggacatgtcctgcttgacagtgaccgctaagcccaggttccagtgatcctggccgaggtgccagatgtaggagttaaggagcctcccgatgaccccagcccagctgagcaagtgggcaggaccgcggggataggcagctcccaaaggctccctccccgcggcaggacccctgcatctctgtgggaaaagacaattgttggggccctaaaaaaaacagatttattgattaaaacctcatgcatggccgggcgtggtggttcacggctgtaatcccagcactttgggaggctgaggcacgcaggtcacctggccaacatggggaaaccccatgtctactaaaactacaaaatgtagctgggcaggccgggccggtggcttgacgcctgtaatcccagcactttgggaggccgagcgggtggatcacgaggttaggagattgagaccatcctggctcacagggtgaaaccctgtctccactaaaacatacaaaaatattagccgggcgtggtggcgggcgcctgtagtcccagctactcgggaggctgaggcaggagaatggcttgaacccgggaggcggagcttgcagtgagccgagatcgcgccactgcactgcagcctgggagacagagactccatctcttaaaaacacaaaaaacaaacaataaaaaaacctcacgtcaaatgacttcagcacggactgggctcaggtgcgcacctgctcgtgtgcacgcgtgtgtacccacgtgtatgcatgcatgggcgcgcgtgggcattcctgtgtctcaagtccctttcccaggacatcctggaatcagcagccccaccctgggccgggtcagcgcgtgccatcggagcccccacgtcagcctctctctccgatcggcacctggcgtcccagtgcgcaagccccacgtcatcacgggggccgctgggcccggcctggtctgcagtgtgggaagccggccaggcctgtgaccagcgcccgggccgagggccggacctgcgtccgctgcggggcagggataccgggtccctgcagggagctcaagccccagcgcgcccgcgaagagctgcgcggactcccggctgcttcccccgaatcccgggcgcaggaagcgcgaagccggacgaacgcggggagcgcgcggcgagcccgcctgaggccgcccctcccgccgcccggggtcacgcgccgcgcgctcccgccccgccccgccccgcagcgcctcagccgacaggggcttccgagcgagcagagtcccgcgccccgcactccatggagcagctgctgcgcgccgagctgcgcaccgcgaccctgcgggccttcggcggccccggcgccggctgcatcagcgagggccgagcctacgacacggacgcaggcccagtgttcgtcaaagtcaaccgcaggacgcaggtgctggcccgtgcgcaggcgggggctctgcgggtctctgcggggcctgggaaggcggaggggtcgggggcaggcgcatttcctggggctgggcctggggaggggtcagctttggcccttgggaggtggcacctgctgggtgagcccggctcaagcgttctgtgaaggtttgtgtctgcacgatccgtgaccttcctttggcctccatgcgcagcgcacaggcttctaggggtggttttaactttcctatccagcaagcgtcgggggatgtgaggcttggggtccttggctcagctctgggccgcccctctcagcccaccgtcctcctggcagtgggaaagaagcagagacatggctgggcccctggcagggaccccacgggccaggccagcgttctccttcccacaggccttgtctgtgtttagacctgatttctatctcctgctgaaaatagttctgtttaagaatgtatggaaggccgggcgcggtggttcacacctgtaatcccatcactttgggaggccgaggtgagtggatccctgaggtcaggagttcgagaccatcctggccaacatggtgaaaccccgtctctaccaaaaaatgcaataattagccggatgtggtgccactggcctgtaatcccagctactcgggaggctgaggcaggagaattgcttgaacccaggagatggaggttgcagtgagccaagatcgcgccattgcactccagcctgggcaacaagagggaaactccgtctcaaaaaaaaaaaagtatggaaaatgttaacggaggaagtggagaaggttagcttcagccttgagagccggcaggtggagaaaggcaggcctgggtgccctcccggcccgagtgggctcagaaggccctgcacactctggtgggggagctctctgaggggcagcaggggtcctggtggggagtgctggcaggaggaacaccagagccatgcagcctgggcgtgcgatcggatcctccggcatcacctgctctgccggctcagaaccaaatccctcaaagtggggagtcctactcacagggaagcagtttttggttcaggcttcccacgggctctgggaaacttcctcagctggtcctgaaagctctgcagggtgagacccctccttccctcccacccccacgaggggccggcacatagtagctgctcagtccatgcataagagcaggtgatgctggggcccctggggcttagcagccccaaggccgggagttcctggcctggtgcatggggggctcgccctggagcagggctggggtgtgccggccgccctcccacctgtggacactcacacccaccctcggtgcaggctggccagggctgccaggctggggaggctgtgcctgggctttccctggggtactttgaaggaaagggcgttctgttcgtgtgcaccagcagatgctttggtctcattcatgaggtttgatttttttaaacatgcagtcctacactttgggcgactgaggaaaggtggatcacttgaggccaggagtttgagaccagcctggccatcatggtgaaattccatctctttttttttgagacggactcttgctctgtcgcccaggctggatctcggctcactgcaagctgcgcctcccggttcactccattctcctgcctcagcctcccgagtagctgggactacaggtgcccgccaccttgcctggctaattttttgtatttttagtagagacgaggtttcaccgtgttagccaggatggtctcaatctcctgaccttgtgatccgcccaccccggcctcccaaagtgctgggattacaggtgcgagccaccacgcacggcggtggaactccatctctagtaaaaatacagaaaaacacagcggggtggggtggcccacacctgtaatcccagctactcaggaggccgaagcaggagaatcgtttgaacccaggaggcggaggctgccgtgagccgagatcatgccactgccctccagcctgggtgacagagtgagaccctgtctcaaaacaaacatgcaattctataggccaaggtattcatggaccacgttcgtcaatgcatgttttcaaccaatgtgtactgtacgtgaggtgagtgttcacctaactgaaaactggaatgtttgtgggaatatttcagaaacaggaaggcccaggtcccacgggaggcgttgggggccggccgggtgtgccgtgccttttaccttcccagcccctgccctggacctgaggccccgcctgatgggcccagccctcttcttccctgcctgacgtgtgtgcccaagttagctccagtgaggcctctgctgtggctgccccaccctaagaggcagcaaggaaggtgggtagcccgggggtccagctctggaccttggttcactcacacctccccacgccctcagtgctcccgggcacccacacgtggcctgtgcatcctcctgtcacagcagcctgcagaccccacacccctcacggcccaggctcagcctcagccttgcagcctctcgtctccgacggggggcccctctgcaccctgccctctgtggtggacgccagctcccagccagagccagctatcagtgaatgaaggtccttgtgactcccacgtggtagcttctgtcaagggcccagtgggcagaggccctggctgagtcaacaaggctgacaaggctgtgttctggatgcaggcccggcagatgtttgagggggaggtggccagcctggaggccctcaggagcacgggcctggtgcgggtgccgaggcccatgaaggtcatcgacctgccgggaggtggggccgcctttgtgatggagcatttgaagatgaagagcttgagcaggtgagtgtgtgtgagacccatatgcgcacatgtgtacaggcagagagagactcagagacaaacagagagagacagagaaagggatagagatggggagggagacagaaacagggagaagcctgtggctgagccgtccacacaactgcccggttatcagaggcagggccaagagttccaccctgccattcttaatggagataaaaagttactgctttctggtatgtgactggttttcctagataagtttggctgtaatgaggctgcataaaatatatatatatacacatatatatatatatatatatattttttttttttttgaaacacagtctcgctctgttgcccaggctagagtgcagtgcagtggtgcaatctcggctcactgcaacttctgcccccagggttcaaatgattctcccacctcagcctcctgagtagctgggactacaggtgtccaccaccacacctgactaatttttgtatttttagtagagatggggtttcaccatgttggctgagttggtctcaaacttctgacttcaagtgatccacccacctcggcttcccaaagtgctgggataacaggcctgagccaccacacctgcccaaaataagtatatttgaacccatcatttgctttgtactttatttttattttatttttccaagacagagtcttgctctgtttcccaggctggagtgcagtgatgcaatcttggctcactgcaaactccgcctcctgggttcaagcaattctcttgtctcagcctcgcgagtggctgggattacaggcaccccaccacctcacgcagctattttttttttttttttttttgagacggagtgtcgctctgtcacccaggctggagtgcagtggcgcgatcttggctcattgcaaactctgcctcctgggttgacgccattctcctgcctcagcctcccgagtagaagggactacaggcgcccgccaccatgcccggctaattttttgtatttttagtagagacggggtttcaccatgttagccaggatggtctcgatctgctgacctcgtgatctacccgccttgacctcccaaagtgctgggattataggcgtgagccaccgcgcccggcctaatttttgtatttttagtagcatgttagccagactggtctcaaactcctgacctcagtgatccgcctgccttggcctcccaaagtgttgggattacaggtgtgagccaccacacccagtccatctttttcttttgctttttctttccttttttttttgttttttgagacagagtcttactctgtcgcccaggctggagtgcagtggtgcagtctaggctcactgcaagctctgcctcttgggctcaaatgattcttctgcctcagcctgcagagtagctgggactacaggtgtaccaccatgcctggctaattttttgtatttttagtagagatggggtttcaccatattgaccaggctggtcttgaactcctggcctcatgatctgcctgccttggcttcccaaagtcctggtactataggcctgagccactgtgccactatgcttggccctgcattttcacttatcattactttctcagcattcctcccttaattcctggtacctcctaagacttctgttgaagctcacttggttaattcctgtttgtgattacatgatgttattttctggaaagagtctttgccagtgctgggcgtggtggttcacacctgtaatcccagtattttggaaagccgaggcaggaggagaccccatctctacaaaaaaaaaaaaaaaaaaaaaaaaagccaggaatggtggcacaggcatgtggtcccagctagttgtgaggctgaggtggaaggattgcttgagccctagaagtcaaagctgcagtgagccatgattgtgccactgcactccagcctggatgacagagcaaggcctggccccagaaaagaaagaaaaagcaaaagaaagagtcattgcctggtgttcactttttactgtttgaagaatggagaatagttttcaatgtatttaaacctttctcaaaatggaacaaactgggtggtgttatttattatttgttattttaattagctgcatttcttctttcctcagtcaagcatcaaaacttggagagcagatggcagatttgcatctttacaaccagaagctcagggagaagttgaaggaggaggagaacacagtgggtatgttcagattgcttttgggtacccttgatccagccacattgtctaccctagatgggtgctcatggtacttcttggtggcatttcaataataggttgagttgtataccgtctgtctttacactacattatgaaaatgagattattaaataagaattttgatgtagctgataagctagtagaattggcacatgatcccttttatacccagccctcctgtctggtgtgcttgaggtaataataaccccttttatacccagccctgctgtctagtgtgcttgaggtaggagtgtcctggcagatccatatattgactaattgctactgtatgtagtacatcctcagaccacctatattctagcatgcgtagcccaggcttgtactgatgctctgctgaggtctggcatttaagagaaagacaaacagctccttcaggccaaggatctctgtcaacaggccgaagaggtgagggtgctgagcctcagtatgtggacaagttcggcttccacacggtgacgtgctgcggcttcatcccgcaggtgagtgcctgggtgagggtgttccctgatgccctaatgctggtcacccactctttatatgtgacagaatgctaatctcccaagcaccagcaagattgactacttgatttctgaaagcagagtagaagctgtgatacctggaatggggagagcagacgctgagggtcactgagctgagctgggcagggtcatgggacatgctggggcaggcagatcagcattccaagcagagcgagcctcaagtgcaaaggttgtgttgcacaaggctcctgatgagtctgagggactggagacagtgggtgatgggtagtgtgcaaagtcagggattaagtgctgattactcagctcctctcctgaggcctttacaaattattatttatttagatacaattgaaatataattcacataagatccaccattttaaaggattagaattaattggtttttagtacattcgtgatggtgtgcaaccatcactgctgtttaactccagaacattttctttcttttcttttcttttttatttttttgagacggcattttgcccttgttgcccaggctggagtgcaatggcacgatctcgacccaccgcaacatcggcctcctgggttcaagcggttctcctgtctcagcctctcaagtagctgggattacaggcatgcaccaccacacccggctaatttttgtatttttagtagagacggggtttcatgttgaccaggctggtctcgaactcctgacctcaggtgatctgccctcctcggccttccaaagtgctgggattacaggcacgagccaccgcgcctggacttaatgttgtatttttagtagagatggggtttctccacgttggtcaggctggtcttgaactcccaacctcaggtgatccacccacctcggcctcccaaagtgctgggattacaggtgtgagccaccatgcctggccagaacattttcattatcctaaagcagaacccattagcagtcactccccatttccccctttcctggtccctggcaacctctaatgtaccttctgtctctttgaattttctggatatgtcatatgagtggaaacacataatatgtgatcttttgtatctttcattcagcatcatgtttcacagctcttccatgttgtagcaggtgttagaatgttattcttttatggctgaataatattccattctatggctaggccacacgtttctttacatattcctttttatggctgaataatactggagcctcttgaaccatcatctttgaaatctgtgaagttccaaagaagactttggacagcccaactgccctgtgcttctcttgaagaagccaatattggaccatattttggttttgttaggaacacagcacccattatataagagctagttcaaagtcactgcttcttgaagagagaatactttcaaatctgtctccttgtcgacgcccgtcctgactagttgggtccctgcgaacaatgaccaagctctccctggtgtgggtagagggtgattctcccagctggaggtcacctggggcaagatcctcatgaagcccaagcagatttagggttcccagccaacaggcagtcctcacatctgggctcgctagaactgcacatggagcttaccagatttaccgagacccccgagatctcagccacagctggctcccctggggtcacacacctgtccggagccagtgagcagcaccctcttcacctgtccaggtgagcacggctgggtgcagcttgtggtcctgtggtcctgctgtggatgctgaggtcaagggctgcaagtggcgggctctacaggacttggctggcccagcagagtggtgtttcaaagaaatgaagtgaaatcttacccagagcccctgtgtgtgaagcagacgagaagggggctagtctgtttggagcacagggagcccctcaatgcccctcggactccaggatcaaggaacccacctcagatcaggtgcagcctggctaggaagggtgaggcgccagggaggacacctgccctgcttcctgcttgttgtgcctcggacagcaccaggttccggaggcttcccactccttgggagggctcaatgggtcctgggggaatgtgtgctgcagccaatggggggcagtgctgagcggcgggctcctcagacacctgggcactaaggccccctggggctgccagctgggtcggctgtggtgcttgccccatgctctgtacactgccacatacaggcacccttctaagcacttcactgaactcaactcacccacttgccctagcaggtaaccaggcagataatgtcactgatccgttttatagatgaggaaagtgacatgcagagttcatgcctgggtccatggagcttgtcagcggggcagctgggcttcgaccctcagtctggcttcagaccacaggccctgaccatgacgcagcccctctgtcaggggaggcctggtcattgggaccagctgtgtacccaggtggcaccttccccgggtagcttggaggatcacagcccctctgttcaggtggcaggactgggctagcccaggctggtcgcctgcttccagcactaaacctggttgtcttctggaaagagtacagagctcagacgctgggagcttgggcaggcaaatgggaaataacgggaggctgcacggtgcacctctgagctggggatctgacagccaggctatggggaggggcctttccatcctgctcttgaggtgcacacagcaccagagggtgagcccaggggccgagtcaccacagcacccatgtgcagggagattcttggtgggggccactgaccagggcggtcctccccgaaggagttttacaaaataaccctttgtataaaatcagcttcgtatttttctctacagaggtgtaatttgacataaattgcacccatttaaaatgtataatttggtacattttgatgtttgtacctgtgaacctttaccacagtcaaggtgagtatactgattacccccaaaaggttcctcgtgcccttccctgcccctgggcaaccattcattggtgttgtcactgtagattagtttgcatcttgtggaatttaatataaatagaatcatgtggtatgtcttctgtctgcttctctcatgaaggggtgggttgcccctccacacctgtgggtgtttctcgttaggtagaacgagagacttggaaaagaaaaagacacagagacaaagtatagagagaaataaggggacccagggaactagcgttcagcatatggaggatcccgccagcctctgagttcccttagtatttattgatcattcgtgggtgtttctccgagagggggatgtgtcagggtcacaagacaatagtggggagagggtcagcagacaaacatgtgaacaaaggtctttgcatcatagacaaggtaaagaatcaagtgctgtgcttttagatatgcatacacataaacatctcaatgctttacaaagcagtattgctgcccgcatgtcccacctccagcccaaggcggtttttccctatctcagtagatggaaggtacaattgggttttataccgagacattccattgcccagggacgggcaggagacagatgccttcctcttgtctcaactgcaagaggcatgccttcctcttatactaatcctcctcagtacagaccctttatgggtgtcgggctgggggacggtcaggtctttcccttcctacgaggccatatttcagactgtcacatggggagaaaccttggacaatacctggctttcctaggcagaggtccctgcagccttccacagtgtttgtgtccctgggtacttgagattagggagtggtgatgactcttaacgagtatgctgccttcaagcatttgtttaacaaagcacatcttgcaccgcccttaatccatttaaccctgagtttgacacagcacacgtttcagagagcagggggttgggggtaaggtcatagattaacagaatctcaaggcagaagaatttgtcttagtacagaacaaaatggagtctcctatgtctacttctttctacacagacacagtaacaatctgatctctcttgcttttccccacactctcactcagcataatcatgctgatatttatccaagtctaaaatcctttgatattcatccgtgatacacatccatgttgcatgtgtcaaaagcccattcccctgtacggatctaacacagcctgtttatccattcacatgtggatggatttctggatcatttccagtttttgctcatacaaataaagccgctgtgaacctttgtgtacaaatcttggtctggacaaatgcttccacttatctcgggtaaatacctaggagggggatgactgtgtcatatggtaggtccatatttagctctttaagaaactactggccgggtggggtggctcacacttgtaatcccagcactttgggaggctgaggcgggtggatcacaaggtcaggaggtcgagaccatcatggctaacacagtgaaaccccgtctctactaaaaaatacaaaaaattaacagggcatggtggcgggcgcctgtagtcccagctacttgggaggctgaggcaggagaatggcgtgaactcgggaggtggagcttgcagtgagccgagatctcgccactgcactccagcctgggcgacagagcaagactccgtctcaaaaaaaaaaaaaaaaaaactaccaaactcttttccaaagtggttgcaccatgttgcattcccaccagcagcatatgggagttccagttcctccacatccttgtcaacacttgagattttttgttttaaattacagccatcctagtgggcgtgaaatattatctcactgaggttctattttgcatttccataatgactgaagatgtggagcatctattcgtgtgcctgtttgctgacaaaatatcttctttggtgaaccatgtgttcacttattttgtccaatttgtgaatagggttttttttttattattgagttttgagatttctttgcgtatttaggatatgagtgttttaccagatatatgatttgcgaatagtgtctcctagtttgttgtttgtgtattttcttggaagcgtccttcagaggctgggcatggtggctcgcgcctgtaatcccagcactttcggaggccgaggtgggcagatcacttgaggtcaggagttcgagaccagcctggccaacatggtgaaaccccatctctactaaaaataccaaaacattagccaggcatggtggcgggcacctgtaattccagctactcgaaaggctgaggcaggagaattgcttgaacccgggaggcagggaggttgcagtgagctgagatcgtgccattgcactccacctgggcaacaagaacaaaacttggtctcaaaaaaaaaatttccttattatcctttttattgttgttgagatggagtttcactctgttgagcaggctagagtgcagtggtaagatcttggctcactgcaacccctgcctcctgggttcaagcgattctcctgtctcagtctcccaagcagctgggactacaggcacctgccaccacgcctggctaatttttgtatttttagtagagatagagtttcaccatcttggccaggatggtctcgaactcctgatcttgtgatctgcctgcctcggcctcccaaagtgctgggattacaggtgtgagccaccgcgcctggcctcttgcttactttaggtttaatgtgctctttttctggttggttaatgtagcagctgaggtcattactgtgagatctttgctaacacagatgtttagtgctacacattttccccaagtactgctttagtggcatctcacaaattataagttgtgtttttgctttcattcaattgaaaacactttctaatttccctttagacatctttcttaaacagattttagaactgtgtttagttttaaaatatttgaggatttcccagaatttttcctattgattttgttttgttttgcttttctgagacggagtcttgctctgtcaccaggctggagtgcaatggcacaatctcagctcactgcaacctctgcctcttggtttcaagagattctcctgcctcagcctcccgagtagctgggactacaggcatgcaccatcacgcccagctactttttgtatttttagtagaaatggggtttcaccatgttggtcaggatggttttgatctcttgacctcgtgatccacccacctcggcctcccaaagtgttgggattatgggcgtgagccaccaggcctggccttcctattgatttctaattgaatttgattatactttgcatgcttaaattcttctcaatttattgagatctgtttgcatggagagagaaatcctactctattcctcttcttataggccactaatcctattggattaataattcacccttacgattttatttaaccctaattacctcctagaggcccttcctccaaatacaggtatattaggggttagggcttcaacgtaggaacgggggtgggcaccattgagtcaatagcaggatatgggatttatctatttttcctgcagttcttttacgtattttgaagctgtgttattagaggtgtaggcatttaggattattatgttcattagtcgactccctttgtgaaatgactatatttgattttctttgctttgaaatctactttgtcttgtattaatgtagccactctagctttctttttttttttctttttttttttgagatagagtttcactcttgttgcccaggctggagtgcaatggcgcgatctcggctcactgcaccctttgcctgtgggttcaagcgattctcctacgtcagcctcccaagtagctgggactacaggcccacgccaccatgcccggctaattttgtatttttagtagagatggagtttccttatgttgcctagactggtctttaactcctgggctcaagggatctgcccacctcagcctcccaaagtgctgggaattgcaggcgtgagccactgtgcctggcctccagctttcttttgactagtgttagcatggtatatcttttctatcctttcaagctttttttttttttagtagataatgtctttttgcacataacttattgttggatttgctttatttttccaacctgccaatctgtcatttaccaagagtatttatttttgacattcgtatttaatgtgcttagtcatatagttttgagtctgtcatcttgcaatttgttttttgtttcatctgccctttgttctctctttacctgccttcctctgggttgagtattttatgtttctgtcttacctcctttgttggcttactaggtatctttgctgggttttgaatggtccctctagggtttaggcagcacttggctccgaattgcaacagtggcctcttttcccttgttgtccaggtgaatgagtggcaggatgactggccgacctttttcgcccggcaccggctccaggcgcagctggacctcattgagaaggactatgctgaccgagaggcacgagaactctggtcccggctacaggtgggcacggcagtgacttctctgggaaagagctggtcctctcatgatcccgccgcatttgtgcgggttcatctgtaaaacggagctggagcagggaacactgagtcctggagcacacatcagggaggaaggggggcaggggcgggggttcccccaaaagggagtccgaaaggagtgaggagtgaagacacacttggctcctcgtgcccctctccactgctaggtcaccaggtatttagcctcagactttcctcatgtgaaacacaggtgcttgtaaatggtggtgtttaccatgattactgttcttactatcagtaacacttgtccactccatcgtgttcctctcccatgggaagatgtgggtaccagatgatccagaatgactgatttcaaaacataactctcggccgggcacagtggttcacgcctgtaatcgcagcatttgggaggcctaggtgggcagatcacttgaggtcaggagtttgagaccagcctggccaacatggtgaaaccctgtctgtactaaaaatgcaaaaattaaccgtgcatggtggtgcatgcctgtaatcccagctactcaggaggctgaggcaggagaatcacttgaacccgggaggcggaggctgcagtgaggggagattgcaccattgcactccagcctggacgacagagtgagatcctgtatcaaaaagaaaaaaaatcaaaatataactctcaaaatgttaaaaaagaatgtgcatgtcaatccagagtgagtatacatcaaagagacttgaactcattaatgaagaaactaggctgggcacggtggctcaagcctgtaatcctagcactttgggaggccgaggtggatagattttacctgaggtcaggatttcaagaccagactggccaatatggtgaaaccccatctctactaaaaatacaaaaattagccgggtgtagtggcgggtgcctgtaatcccagctactcagtaggctgaggcaggagaatcacttgaatccgggaggcggaggttgcagtgagccgagatggcgccactgcactccagcctgggtgacagagcaagattccctctcaaagaaaaaaacaacaaaaccaaacaaaacctgcagacatatatgtgtagcgaaataaaagtggccagagtttgctaaggtagcgcaacactggttcctattctgtgggtcgattaaaactataacctcagaggttctccactgtgtggggattctagacctaaattaggaggaaatcctaagttagacaaagctagactcccctgaagtcaggtggcccctatttctgggcttggcaggcagtgctggggctggacaccgaagcagatcgcgagtgggctttgccttatttccaagaacgaggtgatgagaccggggctcccagaggccagcgataactgcagccgttgctctcgtaggtgaagatcccggatctgttttgtggcctagagattgtccccgcgttgctccacggggatctctggtcgggaaacgtggctgaggacgacgtggggcccattatttacgacccggcttccttctatggccattccgagtttgaactggcaatcgccttgatgtttggggggttccccagatccttcttcaccgcctaccaccggaagatccccaaggctccgggcttcgaccagcggctgctgctctaccagctgtttaactacctgaaccactggaaccacttcgggcgggagtacaggagcccttccttgggcaccatgcgaaggctgctcaagtagcggcccctgccctcccttcccctgtccccgtccccgtctccgtctccccgtccctgtccccccgtcccccgtccctgtgcccccgtccctgtccccctgttcccgtctccccgtccctccgtctccatccccccgtccccccatcctcctgtccccgtccccccgtccccgtccctccatccctgtcccccgtccccctgtccccctgtccacataccaatccccctgtccccgaccccccatccccgtcccccatctccgtccccgtcccccctgccccgtccccgtctccgttcccccgtccccatcctccatccccgtctcccatcgccgtccccccgtccccgtcccccgtccccgtcccccctgtccctgtcccccttcccccgacccctcccagatcctggggaccaataaagcccgcagcgggtctcggctggcgtcctgcgcctcgttcctccgctcgtggggctgctttcagggccagacgcacggcgagctgtgcacggacgtttttgcggcgattcaggggaaacgcacgcggacccggtagccaaggccaaagtcggcgcagcgcccaccgcggcctccgggccccgctcccgctcccgctctggggcgcgccaccactcggcgcggggcccgtgtgatccgcgcgggtcccagcgtggcgcgaataagtgtcagggcggttggctctgaggggtgggtcccggggctcgcctcgcgcccccgactgcgtgctcaggccccgcccctccccgtccacgcatgctgaggctccgccccgctccgcggtcccccggtcccacccgcccccgccccgcccccgccccgccccccggcgtgttgtggctccgccccgctgtctccggccccaccgcaagccctgcccctcccacccacgcgtgcccgggccccgcccccgttgcgcgcagccccgccccctatcgcgtgctcaagccccgccctggcggcccccggccccatcccgaagccccgcccccccgcacaccgcctgctcaggctccgccccgctgtcctccggcggcggcctcaccccgcagcccggcccaccgcgtctcaggccccacctcctgtcctgccccgcccaccgcgtgctcaggccccgctgagcggtcccggctccgctcgcgccctgtggggtccacggcgcgctcttccagagcctttgggacccgtgcccgctcgcgtcctcaagtgcacgcgccgtcccgcgcgcggtattttggcggccgacgcgttccgtagcgaggccggcgagtggggtcggaggtcgcggggcggggccagcgtcggttgccgccttagcgggcgcctccttttcatccctcatccttcatccctggctttcgcgctctagcggagtgggatctgcgaacacgtgaggcgggggcgcggtccccaggctgccgagatggccctgagcgacgaaccggccgcgggcggccccgaggaggaggcggaggacgagacactggcctttggcgcggcgctggaagcgttcggcgagagcgcggagacccgggcgctgctgggccgcctgcgggaggtgcacggcggcggcgcggagcgcgaggtggccctggagcggttccgcggtgcgtgggcggcgccgcgtgcccgcttcctcccccggcccgggttcggcgcgctgagtgcactttaccgggcggggaccgcagcccggcggcgccggccgctctgcgagggctgccggtgcgcggtcccgcgggccgtggtggggcgcggccttcctaggcgggagagggccaccccggcgcggcgttaggtgcacggggcagacgcgcgcctcccttggggggaccgtggcccgcggagcgcctgctctcgcacggggtgaagcctctgcggcctccccgggaggcggggtgcagaagccctccgtcccccgtctccgtcactggaggaggtccctgggctggggagactcgggccagacccctccggacagctggtcagccctgcagtgtggactcccaggcttgcctccaccgagcgcggtttctgtgaatgttgtgtggacagggagatagggaatgagagagggggacgcagggaacaaacctgctgcaaacaaagcgcgcctcgggtggggagggcagcagcctgtccgttccgtggacgccgtggacagagcgggctggccgggtccgtgcctctgcaggcggggtggggtgtaggtacccctgtggaggccattcgatgagtctaaattctccgagttcagacccacctttaccgctgtctataatgggttatttccaaacaagtccttaggagctcatagctaagtagttacatggggttttgtaattcagtaaaatcatctttgtagaccctttgagtaagaagaacttttgcattatttggccttcctcattttagaatgacagcgctttgattttaggagtcaggcagggtggggggccttgtgggaggagtgcgggttcggcgtcagatcctcctgcctgtgaattctggccctgtcgcttggacctgatacttgattgcctgtttcttcgggtgtaagctggggcggataacgatgcctctcgtgcagaactgttctgagggtgagggaccctcatccagggaccagtgaagccagattttttgttcctggtgtaacagcccaatggcttcttccttttttttttttttttttttttgatacgaagtcttgctctgttgcccaggctggagtgcagtgcagtggtgcgatcttggctcactgcaacctcaacctctcaggttcaagctattctcctgtcttagcctcccgagtagctggggctacaggcgcgcgccaccacgcccggctaattttgtatttttagtagagggggtttcaccatgttggtcaggctggtctcaaactcctgacctcaagtggtcgcccgactcagcctcccaaagtgttgagattacaggtgtgagccactgcgctcggccccagtgggttctttctgcgggctgcccagatagagttgatttgtcagggcaggggagttgccatggagaagatttagttcacgcagagccggttgaaagggagactagactagaggtttttttttttttttttgaggcggagtctcactttgtcccccagggtggagtgcagtgatgagatctcagctcactgcaacctccacaacctccacctcccaggttcaagtgattctcctgcctcagcctcccgagtagctgggactacaggtgcgcgccaccacgcccacctaatttttcgtattattagtagtgacgggtttcatcgtgttagccaggatggtctcgatctcctgacctcgtgatccacccgcctcagcctcccaaagtgagccaccacgcccggctggagttttattattactcagatcagtctccctgagaatttgagggccagggttttttagaggtaatctgggggaaagggtgggggtggctgattggttaggggtatacaatcataggggagtcggaaatgatcctccgtgatgtgctgaatcgcgtctgcgtggggccccaggagcagtgggcgggtccaggtggagctatcatgggtccgtggatcctagtgtaggtgtcagacatggaaacaatctgaaaagatatctttaaaggccagtctcaggttctgcaatagtgacatggtctgcaggagtaactggggaactcgcatgtcttgtgatctcaagaataatggctggcaattaggttacgccttagcggaattcaggctcctctcctcctcctagcctggtggcctctcattaactttacaaaggcagttgagttttggggaagggctcttagcatttaaactataaattaaatgtctcccagaggtagcttggcagcttgaagactaaaggcatgagggggttgcctggatcagatctgccccattgccataatttcctcacagatcacttttgcaaaggcagttttgctgggaagcagtgggtgtgttcagatgtggaggtgggagctgccggattggacagaagcagtttcagctgctgagaggaggagaaagcggtggttcagggtctgggaggttgtgaagagctggcagctgtgtggaagggagcagtgcctggatatgtcaaccaaaaagtatctgagacgagtctcaatcagtttagaaggttaagggtgtgcccgtgaggcagcctcaggaggtcacatgtccccaaggaagtcgggctacagcttagttttacacgttttagggagacgtgagacatcaatcaatacctgtaagatgtacattggtctcgtcagggaaggcgggacatcttgggtgggagggcgtccagggcattggtggattcaaatatttcacgattggtgattggttgaaagagtttatctgaagacctggaatccatagaagggattgtctaggttaagataaattgtggagaccaaggtttttcttatgcagatgaaggttccagttagctggtttcagagagaatagattgtaaatgcttttcatcagactaaaaaggtaccagacttagttaattttctcttggatcagggaaaagacctagaaaaggaagggattctctacagaatgtagcttttcccagcaagagacaacttagcagaaccatttcaaaatatgtcaaatatattttagggaaaaatattttgatttctttcagggcctgctgtctgtcatgtgatgctgtactagagtcaggctggaatttggtgtcttattgctacttaagatcggttttaatgctaatactgatcagctgtgcctgaattccaacgagaggagggtataatgaggcctatgtggaccactccccacaatcccttaatatcatgaggcctgaactagtttttcaggttaagtttggaatgcccttggccaagaggaggggtctgttagatggctagggggcttagaattttgtttttagtttacaggcatgtttggcaggggagtgtgagaggagtgccagggatgtgtgtctcacaaggacagagttgagcttggcccttaacggctggcagaggcaggagagagtgaaggaaggaagaggcgaggaggagactctgttaggaagagtatcgaggcagtgggaaaagaggaacagtgtgccaagcaagtaaactgcacgaggctgggccacagtggccctcaaaaggctagagggaggtggggcattccctccaggtggcctgtgtggcctcctttagtgagaggggaggtgtgctcttgagagctggggaagaggtggagctgccctgtggaagctagcaagggaaaatggggtttctgaggctcatgggtatgtttggcctagtgataattaattttcatgttatatttgtttttagtaataatggacaaataccaggagcagcctcatctgttggacccgcaccttggtaagaatagaagctgctgattttgatcattcagttacagatgaccacggaggccttggtgtgtggtgctggcacatgcatgtgctttgccaggatcaaatgccaagaagtgtccctgtcttgcttgcctggctggttggttttagccgacctgtgatagtggcttgagttccagatgtcactctaggctggggggagatgtgtctgagctacttaattcctttctgctaaggaaacaacatctgctcctcatgtgttttttttgtttttttttcttttttttgagacggagtctcgctctgtctccaggctagagtgctgtggcgcgatctcagctcactgcatcctccagctccctggttcaagggattctcctgcctctgcctcccgagtagctgggattacaggcatgcgccaccatgcccagctaatttttgtatttttagtagagacggggtttcactatgttggccaggatggtcttgatctcctgacctcgtgatccgcctgcctcggcctcccaaagtgctgggattacaggcgtgagccaccgcgcctggcctcctcaagtgtttttagtttacattagtttattattttagtttacatttgggcacatgatgtttttctggtaatagtcatacagggtcaggtgttttacatgggtcatcatttaatcctcacagcagctaaggagggcatctgttgtcatctccagtttacagatggggacactgaggctcggttttcttactttagtgtaaggggtgtggtttcttattgttttctttatttttgatgtatttcacactgattaaaatttttctttttctacctacaaatgtgacacatgcttctggcagttcacctgggaaagaggaaggtggcaatagtcaccacgttgagagggagcaccctgggtgggggcaccctggcttcatagcccagtttcaccattcagtttttgagctgctctttgccggggtttcctcgccccccgtggtgttgagatctgtgtgagagacactaagggtcagcctttcatgtgcgcacacgtgcctcttaaagagtagtttgtgctgtgcatcttgttctgtttttttttcttcaaataacagattttggctgggggtggtggctcatgcctgtaatcccagcactttgggaggtggaggcgggtggatcacttgaggtcgggagttcgagaccagcatggctaacacgatgaaaccctgtctctactaataatacaaaacgttagctgggcatgctggcagttgcctgtagtcccagttacttgggaggctgaggcaggagaatggcgtgaacccgggaggcggagcttgcagtgagctgagatcacgtcactgcactccagcctgggtgacagagtgagacttcatctcaaaaaaaaaaaaaaaccaaaaaaaaccctctaaattcgggattcaagaattcattgggatcagacttgtccttctgtcctagaaaaatttataggccttgtgaaggagaccaaagatagaggtccttgggagagggtcagctgcagggaacatgactctgacatctggtggaggggctagccatgctggatggcgtggcaggcagtgggctccccaggccatatcttataggaggtcttgggttcctggagttcctgtgtgtgagcgctggttcccaggaaacagatgtggtcactgctcacaaggtagcgggtggtgtttttatatctcttcaagtaacaacgttggacctgtagttaaatgcctttattcttgccagacctctttccagagtggatcatggaatattaacacttgttgtgagctgcttagagtactgcgaatgatttttagagttattttctttctttgcaaaaactgtttttcgccgggtgtggtggcttatgcctgtaatcccagcactttgggaggccggggcgggtggatcacctgaggtcaggagtttgagaccagcctgaccaacatagtgaaaccccgtatctactaaaaatgcaaaaattagccgcgtgtggtgcacgcctgtaatcccagctacttggggctgaagcaggagaattgcccgaacccaggaggcagaggttgcagtgagccaagatcgtgccattgtactccagcctgggcaacaagaacgaaaacgtctcggaaaaaaaaaaaaaaaaaaataaataaataaataaatttttttttttgtagagaaggggtcttgccgtgttgcccaggctggtctcatacctctgggttcaagcggttcacccaccttggcctcctaaagtgctgggatttcaggtgtgagccagcgtgcccagctgagttcattattttctggaattcctttttagaaaaaggaaaatgtagtcgtgggatgctggtcctttgtcatttgttgcacatttttccacccttttgcttttttttttttcttttttttttttttttttgagatgtagtctctctgttgcccaggctggagtatagtggcccaatcttggctcactgcaacttctgcctccagggttcaagcgattctcctgcctcagcctccagcgtagctgggattacaggcgtgtgctaccacgcctggctaattttttgcatttttagtagagacagggtttcaccatgttggccaggctggtctcaaactcctgacccccacgtgatctgcccaccttggtctcccaaagtgctgggattacaggtgtgagccattgtgcccggcctgcttttgccttttaatattgtgtctggtgtattttatctactgaagttttttcgtgtttgtttttttaaagagatgggatctcgctctgtcacccaggctggagtgtagtggcgcagtcatagctcactgcagccttgagctcctgggattaagtgatcttctcacttcagcctcctgcagagctgggacaacaggcacaagctgccatgcctagttaattaaaaaacttttttttttggccaggcgcagtagctcatgcctctgatcctagcactttgggaggccgaggcgggtggattacaaggtcaggagttcaagaccagcctgaccaacatggtgaaaccctgtctctactaaaaatacaaaaattagctgggcatggtgaagcatgcctgtaatcccagctacttgagaggccgaggcaggagaattgcttgaactgggacccaggacgcggaggtagcagtgaacgagatcgtgccactgcactccagcgtgggctacagagccagactgtctcaaaaaaaaaaaaattttgtttttgcagggtcagggtcacgctgtgttcctcaggctggtctcgaacttctggccccaagcaatcctgccttggcctcccacagtgctgggatgacaggtgtgagccactgcacccagtctctactgaagttttagaaatatttagcttgtcaaactatcagtttctttgtgtttggcctttggtagtacggttagaaagtttatttttcctaatcagttatgtaagcctcatttattggatgatttagtggcctctcccctacttgaaatgccattttaaatctatattaaatattcaaatatattagcctttgcttttagattttttatcctgttccattgacctatctgtatgctcttttttctgggtcatttcgtttgtttgttttttttttttttttgagatggagtctcgctctgtcacccaggctggagtgcagtggcgtgttcttggcttactgcaacctccgcctcccaggttcaagagattctcctgcctcagcctcccgagtagcatgtgccaccacgcctggctaatttttgtatttttagtagagaacggttttcatcatgttggccaggatagtctcgaactcctgacctcaagcagtctgcccgccttggcctcccaaagtgctggaattagaggcgtgagccaccacgcctggcctgggtcattttgtttgatgttagtttatattttgcctggcatcctttcctcttattttcttgatggttttgtagcccgttcattaatgcggatgaactccggaattattttatcactctccaccctttggaattctattaaattcacaaattcatgtaggggagaagtctttctaagatttaattttcatgtctaagatcatggtattatgtctctaattattcacatcttttgtgttcctcagtgaaggttggtgattttctttagatgattcctggagacttttttttaggtttatttctaggtatgttttgtcttttattgctcttgtgaaactatttgttatgtgttctaactagttattgctgatgtctagtgaagatatgttttgtatactgtttttgtaaatggcaacactgtaatggaatatgtatgtgtaaacatacatttcttaacatctttatagggatataattacatactatagagttcactcttctaaatatacattttagtgttagtgtattagtgtattacagagttgtgtaactatcactaccacaatctaggcattttcatcatctgaagcaacccaactcccatcaacaattccttcccattctctgcttccgcagtaaccactcatctggctctgggtttgtgtgtattcagcattttgtgtgatggaatcatgcagtaggaggtcttttggcactggcttttttcacttagcatcatgtctatgaggttcactgtgtgatgaaatgtttacttcaatagtttttcagtctttttttttttttggagacaaagtcttgctctgtcacccaggctggagtgtaatggcgtgatcttggctcactgcaacctccttctcctgggttcaagcgattctcctgcctcagcctcctgagtagctgggattacaggcgccacctgtaaaattagcctggccaatttttgtattctgagtagagacagggtttcaccatgatggccaggcttgtcttgaactcctgacctcaggtgatccacctgcctcggcctcccaaagtgctgggattacaggcgtgagccaccgtgcccggccagttgtttcttctgggttttcttagcaggtaaatattatatggtttgtaaataatgctactctttatccacgattataaatttttattcttagaacattttattgagttttaattttattgagtttaaaatttacctactataaaatgcacccattttagtaagatgtttgagtttcggtaaatgtatacaccccgcgctatcaagatatggaacatttctgtcatcccaaggagttacttgatgtccttttgctgtcagtcccctcaccccagccctagggaaccactgttggttaatggtactgttcattagttttgcctgttctagaatcattcagtatgtgctctttttgtcttccgttgttaaaataacatctccgggacttaccattgttggtgtgtgtatcagtagtttgtacgttttctctcgtgctgataaatcacaatttgtttcttcttttttttttttgagatggagtcttggtctgttgcccaggctggagtgcggtggagtgcagtggtgcgatctcggctcactgcaagctctgccacccgggttcacgccattctcctgcctcagcctcccgagtagctgggactacgggtgcccgccaacacacccagctaattttttttttatttttagtagagacggggtttcaccttgttaaccaggatggtctcgatctcctgacctcgtgatccgcccgcctcagccttccaaagtgctggggttgtttcttcttttatctgttgatggacatttgagttgtttccggtttttggctgttattaataatgctactttttgggaggctgaggtgggcagatcatgaggtcaggagattgagactatcctggctaacacggtgaaaccccatctctactaaaaatacaaaaaattagcccagtgtggcggtgtgcgcatgtagtcccagctacttgggaggctgaggcaggaaaattgcttgaacccgggaggtggaggttgcagtgagccgagatcttgccactgcactccagcctgggtgatagagcgagactccgtctcaaaaaaaaaaaaaaaaaaagtaatgctactgtgaaaatgtttatgtacaagtttttaggtagacagaggttttattttctcttgggaaaatacgcatgtgtggaattgctgagtagcagaaagtgtcttacttgtagaaagtgtatgacttggccaggcgcggtggctcctacctgtaattctagcactttgggagactgaggcaggtggattgcctgagctcaggagctcaagaccagcctgggcaacatggtaaaaccccatctctactaaaatacaaaaaattagccgggtgtggtggcaggtgcctgtagtcccagctactcaggaggctgaggcacgagaattacttgaatgtgggaggcagaggttgcagtaagctgagatgacaccactgcactccagcctgggtcacagagtgagactctgtctccaaaaaaaaaaaaagtgtgtgactcatcacctgccatactgatgccatgaagattgtactgttgaccatttctaccaacaaggtatgaggattccagctgctctgggttctcttcagcactcagcgttgccagtctctctgatttcagggagtgtatctcgttgtgtccttctctgcgtttcccggatgccagttgcagttgttttccatgtatgaagacttgcagcccagcgtatggtctgttttgttgaacattccgcgtgcacttgagaaaaatgtctgttctgttgttgggtagattgttctctaaatgtcacgtaagtaaggtgggtgatagtgctgtttaggtttcagcgattttctcttacttgttctatcagttcctgaaacaggagtgtcgaagttttcaaccgtgtctcctttcatttctctcagcttcttctgtgcttattttgaagctctgtaggttggtgtgtatacttacagaattgttaagtcttcatgatgaattgatccttttattatcatgaaacattctgtttatctctgatggtaatgcttgttctgacatttactttgtctgatattaacagagccactccagctcttttatgatttgtgattggttggaatatctttttccttttgcttacgtttaacctagctatgtctttttgtttgtttttgttttttaagagacagggttttgggccaggtgcggtgggctcacacctgtaatcccatcactttgggaggccgaggtgggtggatcacctgaggtcaggagttcgagaccagcctggccaacatggtgaaaccccgtctctactaaaaatacaaaaattagccaggcgtggtgacgcgtgcctgtaattccagctacttgggaatctgagggaggagaatagcctgaacccgggaggtggaggttgcagtgagctgagatcacgccactgcactccagcctgggggacagagcaagactctgtctcaaaaaaaaagaaaaaaaagagacgggttttgctctgttgcccaggctggagtgcaatagtaggatcatagctcattgccgccttgaaattctggcttcaaatgatcctcccaccttggtctcccaaagtgctgggaaaacaggcatgagccaccacacctggccggcctcaatgtcatgttgatgttcacttttacagtaaatgtttcctatgtttttccctagaatggatgatgaacttgttgttggacatagtgcaagatcagacatctccagcttcccttgtacatctggcttttaaatttctttacatcatcaccaaggtaacatttccatagcacttcagagttgacagatacttttgtaatatacttggtccagaggttaccctccaaaatgttatttctcaagaaagatagttcttagacacaagttgtgggtttaattctgtccctttttactgtatgttggggatcagaatttagtgatgtgggctctttggctgaaacagtgtcaggatattcagcatcttgcatttgaatagattgaagcactgtgtagctaggaagggaatggggtggagatgagactaaatcagaaaaacttcttacaaggagaaagcaggccgggtgcggtggctcatgcctgtaatcccagcactttgggaggctgaggcaggtggatcacctgtggtcaggagttcgagatgagcctggccaacatggtgaaaccccgtctctactaaaaatacaaaaattagctgggcttggtggcacatgactgtaatcccagctgcttgggaggctgaggcgggagaatggcttgaacctgagaggcagaggttgcagtgagccgagatcatgctgttgcactccagcctgagtgacagagcgagactctgtggaaatggaagtgcttctcacactttaatgtgcagatgaatttcctgggaattttgctgtgctatagattttgagcaagtaggtctaggcgggggtctcatagtctgcttttcttacaagcttgcgggtgtctgtgctcatagtctgcttttcttacaagcttgcgggtgtctgtgctcatagtctgcttttcttacaagcttgcgggtgtctgtgctcatagtctgcttttcttacaagcttgcgggtgtctgtgctcatagtctgcttttcttacaagcttgcgggtgtctgtgctcatagtctgcttttcttacaagcttgcgggtgtctgtgctcatagtctgcttttcttacaagcttgcgggtgtctgtgctcatagtctgcttttcttacaagcttgcgggtgtctgctcatagtctgcttttcttacaagcttgcgggtgtctgctcatagtctgcttttcttacaagcttgcgggtgtctgtgctcatagtctgcttttcttacaagcttgcgggtgtctgctcatagtctgcttttcttacaagcttgcgggtgtctgtgctcatagtctgcttttcttacaagcttgcgggtgtctgtgctcatagtctgcttttcttacaagcttgcgggtgtctgtgctcatagtctgcttttcttacaagcttgcgggtgtctgtgctcatagtctgcttttcttacaagcttgcgggtgtctgctcatagtctgcttttcttacaagcttgcgggtgtctgtgctcatagtctgcttttcttacaagcttgcgggtgtctgtgtgctggcccagaggctcactgttggcagttttgactatggaagtactcacagccgtctcagggtggggcttggggttcgtagtggcgaggcgcatttctgttgtctggcgggaaagtccttggccagcgagaggacactgcgggtgagctgccaaggacacgcaggcctctgtagctcctctgtttgaggttaggatttctccggaaggcgtggtatcactgagcttcagggaagtgttaatgaatttgggcccttgcggtttgtaggcacttattcctcataaatgtcagaggacagtcatataaatgaacatatttaatgactgattccgtaaatatggtaatgaataacactaccaatttaggaaggaaatctttttttttgagagatggggtcttgctctgtcactcaggctagagtgcagtgatgcagtcagctcactgcagcctcgaactcttggtctcaaatgattctccctcctgcctcatcctctcagactacaggcatgtgccaccatcctgtctaatttttaattttttatgttgcccaggctagtctccaactcttggtctcaagctattcttttgcctcggcctcccaaagtgctgggattacgggtgtgagccatcgctcttggccatgggtagctttcttggggtgactacggtcttactaaattgtgtcactgtaatgtcacagaattctctttgatcagtgggtcgcgtagctggtgatttttgatgaaagggtagaaaggcaattttgctgctctctgtatttttaaatgttataattcagcatctctttatttgataggttcgaggctataaaacatttcttcgtttatttcctcatgaagttgccgatgtagagcctgttttagatttggtcacaattcagaatcccaaggaccatgaagtgagtgtctctgcctcccccctcgtctccagccctccgtgcctgtccttcctccctgcttgccccaccctgctgcaccttccccttcctgtttctttcattttatctccctttgttttgtgtcactcctcttttctttcttttcttttcacttttcctttacttcttgtacaagttgctttaaattattttcgtttaaaatagcccctttataaaaaaaattatgcctaggtgtagtttaacaataaatccgtcattgtttctatgtttttttaactgtgtaagtataactgtgttgggttcccaagaccacccccaggtttgatacttcctgagcgggactcacagcactcagcatagagtcctccttttggctgtcacttgttatggcaaaataatacacagcaaaatcagcaaagggaaaaggcacatgggtggggtctggggagaaccaggcgggagctcccggggtcctccagttgggtcccacagggcctgtgtcattcccccagcagtgagatgtgaccacacctgtgaggtgtctatcagagaagcacgtttgagacttggtgcccagagctttcactggggtctggccacatggacacctctgcctggcacgaaacgaaattccagacccccagcaggaaagcaggtgccagcgtaaagcacacggtttgtgcagattgagccagcgagggacctcatcaggcagggcttggtgggaaccctgctggtgtccaggtccctggataccagcccagggccggcctcgtcaggggccttgcctcagacggcagcggggcctgctatgctcgctgtcttctgcgtggtatgtatttggaggagcacacggtttataaccgtgcagtgcggtggcttgtctcggcgtggatgtgactgatgagcgctgtggggcatttccctgctgccctgcactccgtgcccttctttccctagtacttctagcgccccccagtggaatgattgcagggacaaattgggatgttttttactaattactgaaaataagggtactccttttttattagaagttgataattgttttctttattcttttttttttaaaaagacagagtttcactcttcttgcccaggttggagagcaatggcacaatcttggctcactgcaacctctgtctcccaggttcaagcgattctcctgtgtcagcctcctgagtagctgggattacaggcatgtgtcatcacgccagggtaattttgtatttttagtagaaacagggtttctccatgttggtcaggctggtttaggactcttgacctcggccaggcacggtggctcgtgcctgtaatcccagcagtttgggaggccaaggtgggcggatcacgaggtcaggagatcgagaccatcctggctaacacggtgcaaccctgtgtctacaaaaaatacaaaaattagcctagcatggtggcaaacgcctgtagtcccagctactcagaaggctgaggcaggagaatggcgtgaacccggaaggtggagcttgcagtgagcgaggttgcgccactgcactccagcctgggcaacagagcgagactccatctcaaaaaaaaaaaaaggaactcctgacctcaggtgatccgctcgtctcggcctcccaaagtgttgggattacaggtgtgaaccaccacacctggccttttttctttattcttaggtgtttttactttttatctgtttttcactttttcaaaaggccagtttgtatgtggagaggtgccagcgaagagaagctgctatactgatgtattatgatttttctttgttcattttgatgtctctcttgtctgctgagctaagttacggcggtaggtgtgtgtggtggggattccgggggggatgtggcgaggagttggtgaacggcttgcatttctggccctgagggtgatggcatttgaatggctttcataggcattgggtgggcatggagggcagtgactttgagtagattgtggccagtggcctgtgattttcaagcaagactcattcttcccgtggtttaattttttaggcttgggaaacccgctacatgcttttgctctggctctccgtgacctgcctgatcccttttgatttttctcgccttgacgggaacctcctcacccagcctgggcaagcacgaatgtccataatggaccgtattctccaaatagcagaggtaaatatcatgcagataattagctgctaattagtactcactttcatgttcatgctgtcttgatgttagtggtttactcggtaagcttctgatatgtattcaactgctgtttttttcagtggggtaaaatcccataggataacttattttgaaattgtgataattcatgtaggggtcaggttgagttagcaaatctcatttctttgtagatgatgcaaatactctgttgagggtaatcatggcagataaggaagggtttagtggcatggtgagagagaataaggacccattttacatttagttcttaacgttatataaataatagatgctcatttgtaggagaactagaaaataaagataagcaagaaaaatactaaatttaaatttatgaaattctagtgccaagagataagttgtttattttctccgaacttttcctgatgtaaatattatgcatataaacacagcttattgtattagttatctattggatcataactaattaccccaaacttgagtgtttgacacacatttatcctcttgtagtttctgtgggtcgggagtctggcatggctgagctgggtcctttgtgtcaagcttgcccacagctgcagttaaaactcgacatgggcaggctttgccccaaggccgttggattgaggccaccctcagttctttgccacctgggcccctccaacttagtgacttattccatcaaagcctgcaagggagaaactctgctaatgagatggaagtcatgataatatgttacctgatcatggaagtgacgtcccattcctctgccagatcctgtggttagcagcaagtcaccgagtccagcctacgcaagcgagcactaggaggctgtcaggctctgagccatctcagttgtctcggtcttcctgccacgctgactgcgacagccctggtcagcattcactgagtgcctgctgtgtgcctggcaccgttcaaacactcatagattaatctttaatcacttatggattaataatttaacctatacattgggctgggcatggtgggtcactcctgtaatcccagcactttgggaggccggggcgggcagatcacgtgaggttaggacttcgagaccagcctggccaacatggtgaaaccctgtgtctactaaaaatacaaaaattagctgggcctggtgacacatacctgtaatcccagctactcaagaggctgaggcagaagaatcccttgaacctgggaggtggagattgtagtgaactgagattacgccactgcactccagcctgggtgacagagcgagagtccatctcaaaaaaaaaaaaaaaaaaatttaacctatacgttgatgattgatagatcatcagtgattaattaactgtgattaataatcattgaattctccttcatgaggctgttgacaattcttaccctcgtttaaccgagaaggcaacaggcataaaaattaataacttagtttactttgctcataaatggtggatccatgtttgaatccaggcggtttatctggagtctgtgctcttcatcagggctcagcattgccccatgacctgctgttctgagtcctttttaccctcagcaacacgttcttagtgtcttacgatgtcagaaagtgtccccctcataatcgttaagggaaaaggtactccattgtaatctaatttaaaattctctctgatagatggatgttttgtttgttcttgttttgttacgttagaggtagtgtggtgatgggctgggtgcggtggctcacgcctgtaatcccagcactctgggaggccaaggtgggcatatcacctgaggtcaggaattcgagaccagcctgaccaacatggagaaaccttgtctctactaaaaatacaacattagctgggcgtggtggcacgtgcctgtagtcccagctactcaggaggctgaggcagaagaatcgcttgaacctgggaggcggaggttgtggtgagccgatatcacgccattgcactccaccctgggcaacaagagtgaaactccgtctcaaaaaaaaaaaaaaaaagtagtatggtttacccacccttgtttacttgtctgtggagagggactgccaggtcaagggagcatggtttgtcaagacttggcactctgtgattgccgttagaaagcctgccccggaggccgggcacggtggctcacacctgtaatcccagcactttgggaggccgaggcaggtggatcacgaggtcaggagtttaagaccagcctggacaagatggtgaaaccccatctctactaaaaatacaaaaattagccgggaatggtggctagtgcctgtgatcctttcatatttattcaactgttctcttacaaatgaacagctacttgggaggctgaggcagagaattgcttgaacccgggaagcagaggttgcagtgagccaagattgcaccactgcactctagcctgggcagcagagcaagactccgtctcaaaaaaaaaaaaaaaaaaaaaagcctgccccagaaaaaaagatcttctaagtgtatcgttatgggaaaaaacaaacaaacaaacaaaaaaaaccgagacaagcattggaaacattttaaggcagccctccgaaaaataaatctagctgggcgtggaggtttcatgcctgtaattccagcactttgggaggccagggtgggaggatagcttgagcccaggagtttgagagcagcctagacaatataatgtgactcagtctctaccaaaaaataaaagaaaattagccaggtgtggtggtacacacctttggtcccagctattctggaggctgaggtgggagggtcatctgagctggggaggttggtgctgcagtgagtttttttttttttgagatggagtcttgccctgtcacccattctggagtatagtggtctaatctcaactcactgcagcctctgcctttgaggctcaagcaatcctcccacctcagcctcctgagtagctgggattacaggcatgtgccatcatgcctggccaatttttgtgtcattagtagagacggggttttaccatattgaccaggctggtctcaaactcctgacctcaggtgatccgcctgccccagcctctcaaagtgctgggattacaggcgtgagccgcagtgcccagcctacagtgagctttgctcacaccactgtactccagcctgggtgacagagcgagacccggtctcaaaacaacagcaaaaaaaccctaagaccagctactggggaggctgaggcaggagaatggcgtgaacctgggaggcggagcttgcagtgagccgagatcgcgccacggccctccagcctgggcgacagagcaagactccgtctcaaaaaaaaaaaacaaaaacaaaaacaaaaaatatatacacctactatgtaccccaaaaattaaacactaaaaattaaaaataactaggtatttgtagtaaatctaggtgctcttcagtttgaacagggcctcttatctagtctgaatactccaatactgatggttcccttgtgctggaaggcatattaggtgctcaatgaatactcttgattctttgttacaattgggtaactcctttgtttacattctcctgctctgttcttgcaaatgtgtgtttcaagggggtgtgaccaaatgctctgtgtagctcaggcacttcctgggtgagtgtagcagttggcagctgtagcccttggctcagattgaagagaggtttttttttgcagctttggacttaggcctgtgctggtaaggtttgtgaacctgggccctcggggagctggtgagggtgggactggtgactgtgtggtgtccccaaggctggcgtgtgcaggagtgaccgtgtctgtgcttcaccctttcttgcagtcctacttgattgtcagtgacaaggcccgagatgcagctgctgtccttgtgtccaggtaagtttccatggcacatttcttggtgtgtggctggtgggttctgagaggggtttgtttgggtacgtgtttcatgtgcgtcttcagtcctcagacgaaggaccccgggaagtctttggactctgtggctttctctgagggagtgtgcagcagtgtttgggcacagaagacctctgaccctgaaatgaccaccctcagtggtggtttggggtgctggtgggggtcacctgacaggcccatcgacaggagtgcaggtctggaagaggcgtggctgtcatccctggggtgcagcccctgcacagggatggggtggcagttatgagaaacatctcgggccgtctcccatggagatgatgggtggtgttgggcctctgtgactggggatgaaaatcccccaacgtcctgtattaactgcaccccccgtgtgccccagacaggggaaggtggttttctctgctgagcgcagcaggcctgcggtgttggaaagataccaaggatgtgtgtatagactgagcgaacctgtttcatgagatgcaagaaggaagaaagcaatatttctaatcagtattttacatgacatgtgattttaagtatgtatgtagtttactaagtcagaacagttgacattttccccctctgcaatagtgaaagtcgaaagctggtcctaaaacctttcggtggttgtggttgggaatacggtcagtgcctcatgcagcgtcaccttcactcgggtgtgtagctgcaacttgcacagcttctttcccagagaagtgggaggagagaagcttcctttgtggggcagttggaggcattggatgaggggtttgtgacagcctggagctgaggaaggaacgcctgagtcccctggagcaggtgaggcccctcccgagagggcagaggctgcttcctgtcttgtcaaggacataaaaagatgatcgtctaattattaaagtaatctgtatatatttagataatagagcatgaagtacaaaataaaacctttgaatgctttcatcccatgggggtgtgatggcccctgtctccctaccgggtggcgccaactctgtccatggtctccccgcggggcggcaccaactctgtccatggctcagttgctgcactcaattctttgcaccacggaccaggagatgggcctggtgcgccattgtcttcttccaaaacgagatgacctggtgcgagagtgtcttttctttttctttcttttttttttttaattgagatggagtctcactttgtctcccaggctggagtgcagtggcacgatctcggctcactgcaagctctgcctcccggtttcacaccattctcctgcctcagcctcccgagtagctgggactacaggtgcccgccaccatgctcagctaatttttttttgtattttcagtagagatggggtttcactgtgttagccaggatggtctccatctcctgacctcatgatccgcccacctcggcctcccaaagtgctgagattacaggtgtgagccaccgcgcctggcccgagtgtgtcttttttttttttttttaatttttttagtatttattgatcattcttgggtgtttctcagagagggggatttggcagggtcataggacaatagtggagggaaggtcgcagataaacatgtgaacaaaggtctctggttttcctaggcagaggaccctgcggccttccgcagtgtttttgtccctgggtacttgagatcagggagtggtgatgactcttaaggagcatgctgccttcaagcatctgtttaacaaagcacatcttgcaccgcccttaatccatttacccctgagtggacacagcacatgtttcagagagcacggagttgggggtaaggttatagattaacagcatcccaaggcagaagaatttttcttagtacagaacaaaatcgagtctcctatgtctacttctttctacacagacacagtaacaaactgatgtctctttcttttccccacatttcccccttttctattcgacaaaaccgccatcgtcatcatggcccgttctcaatgagctgttgggtacacctcccagacggggtggcagccgggcagaggggctcctcacttcccagacttggcggccgggcagaggcaccccccacctcccagacggagcggcggccgggcgggggctgccccccacccgagtgtgtctacctgtcgtttgtggtgggacatttagactgctgccctcccaatttggtattaaaactcaatattgcaaacagtccacgtaaaattgtgtaccgttctgactgatttctagggatgagtttctacaagtggaacgcacgttttcagggtctgaatgcaattactggagaggctgaacaagttggaagttctttccccgtcttttccagttgggtcaaaccttaagaatgtttgccaacttcgttcaatgggaaatagtatctgcttttattcttacttttcttagcagcagtactgagggttgcgtagatttttgccgagcttggctctgtggagtgcggtgcctgtgggccaggaggcaccatctgagtacttctccctccgtggggtcctccgggaaaagagcgcgctggctcgggatcccgggcggactcccggcgagacaccgcagcgccacctagtgccgggatgagcaggtgcttttcggccgagccagtttccgtgcagaacacctgagcctgggatccaggagaggtggtgcctgggggcgtcggtgccgtggagcctttctcccccttggtctcgcacactctcgcacactgattctcaagagtgtttgagaatggcggatgccgtcagtggaagagctcttacaggtgcttggccggttccctcgacacctcccagactcaccgcaggttctgagtttcctgtacttctcagacccctttttggtgaggattgttcaggtaaggccagggctgcgaggggtcctgtgccagcatttgtctgcagtacaggttcgttttctgctctccagggaggagcagcctgctctagcccactttgctctcaggattgaatgcttctccctgtatcactggcggctctacagctgcacccgtctcccttgattaactgagcttgccaacatccacagcgctgtaggtggtgcttggtgttacagtgttgctagaacatgcagattgagtgctgccttagaaacccacaggaaggggaacatcacactctggggactgttgtggggtggggggaggggggagggatagcattgggagatatacctaatgctagatgacgagttagtgggtgcagcacaccagcatggcacatgtatacgtatgtaactaacttgcacaatgtgcacatgtaccctaaaacttaaagtataataataaaaaaattaaaaaaaaacccctttaatagatatgcctttcgccaggcacggtggctcatgcctgtaatcccagcactttgggaggctgaggcgggtggatcacctgaggtcaggagttcaagaccagcctggccaacatggtgaaaccctgtctccactaaaaatacaaaaaaattagctgggcatggtggtgcgtgcctctaattccagatacttgggaagctgaggcaggacaatcgcttgagcccaggaggcagaggttgcagtgagcagagatcgcaccattgcactccagcctgggcaacagagcaagactccatctcaaaaaaaaaagaggtacgctgtatgcagaaaagttggaaatcttggcgtggcgtggtggcacgcacctgtggtcccagctattccgaaggctgggtgggaggattgcttgagcccagaaggttgaggtttcagtgagctgtgattgcgccactgcattccagcctgcacaacagagcaagaccctgtctcaaaaaaaagttgaaaatcttgaaacatagaagttggaaaaagatatataggtaattcttatacacagtgcgtgtaccgtgtttatcttctttgcaccgttatgacttttaatgtgcacagcatgatcttaacaagtcagagtcagcactgtgctttttcacctgatttcatgtaactgctgatgaatggctccgtcgtgttctgctgtgtttcgatactgcactcagctctgtcacttcctgcctcttgtgagcagtcacggacgcctgggtttggttacagacccgttctcgtgtcaggattgtttcgtgaggatgggcccttagagatggacttctgggttccaggacacgagagtggtgttggggtctgcacacctggtggctctcagctgctctctgagcagtgctttggtggccgaggcagccccaggaacaccccacccccaaattggattaaacatggtgtcgctgattgcaggtatttaattggcatcacgctgattgccctcaccttaggtgttacatactccgcttcgtgacctgactctgcgtgtctgtgggctccttggggccttttcttccccacgagtgtgagtttcctccggtgaagggcgatgggtattgccccaggtggttgttggccttttcctttttttttggaccaaagttttaattttaatgtcaaaccgtttttttctcctttatttagttatttttacttttaagcctgcagtcttattaagagatttaacaagtagtcatttatatttttctctaccgtttattaagacagaattattgattcatttggggtttcttttggtctacagtagaaccccgcccttcccagtaggtaaccagttgctttagtgccattttgtgtctgtagggaccagcaccacaaggtcggtgggtttctccctgtgtgtggagatgagagagtgtagaaataaagacacaagacaaagagataaaagacagctgggcccgggggacaactaccaccaagttgcagagaccggtagcggccccgaatgccaggctgcactgatattattggatacaagacaaaggggcagtgtaaggaatgtgagccatctccaacggtaggtaaggtctcgtgggtcacgtgtccactggacggggggcccttccctgcctggcagccgaggcagagagagagagaggagaaggagataaacagcttacattattatttctgcttatcagagacttttcactaatttgctactgctaactaaacggcagagccaggtgtacaggatggaacgtgaaggcagactaggagcgtgaccactgaagcacagcatcacagggagacggttaggcctccggataactgcgggcgagcctgactgatgtcaggccctccacaggaggtggaggagtagagtcttctctaaactcccccggggaaagggagactctctttcccggtccgctaagtagcgggtgtttttccttgacactaacgctaccgctagaccacggtccgcttgtcaacaggcgtcttcccagacgctggcgttaccgctagaccaaggagccctctggtggccctgtctgggcataacagaaggctcgcactcttgtcttctggtcacacctcactatgtcccctcagctcctatctctgtatggcctggcttttcctaggttatgattatagagcgaggattattataatattggaataaagaataattgctaccaactaatgattaatgatatatataatcatatctaagatctgtatctggtataactattcttgttttatattttattatattggaacagctcgtgtccttggtctcttgcctcggcacctgggtggcttgccgcccacagtattccgcttttccattcatttctaatgctctgtgggaactctgtgcgttttaaagggaacacggtttgtcaccaccttaatgctgcttccttctgcgatgaagttaactgccctgggccccttttgcagatccgctaaagttaactctcctggggaggacacatgagtttcttttttctttccttttcttttcgagacagggtctcactctgttgcccaggcgcgagtgcagtggcgtgatcacagtttactgcaacctccatctcctaggctcaagcaatcctcccaccttagcctccccagtagctgggactgcaggcgcatgccacgacacccagccaatttctttttctttttttttttttgagacggagctttgctcttgttgcccaggctggagtgcagtggcgtgattttggctctactggagtgcaatggcgtgatctcagctccactgaacctctgcctccctggttcaagtgattatcctgcctcagcctcctgagtagctaggattacaggtgtgcgccagcacccctggctaatttttgtatttttagtagagacggggtttcaccatagtggccagggtggtctcaaactcctgacctcaggtgatccacccgtcttgacctcccaaagtgttgggattacaggcatgagccactgcgcccggccatgcctggctaatttttgtattattttctagagatggggtttatttatttatttatttatttatttatttttacggggtcttgctctgttgctaggctggagtgcaatggtgagatctcggctcactgcaacctccgcctcctgagttcaagtgattctcatgcctcagcctcccgagtagctgggattacaggaatgcgccaccatgcccagctaattttttaatatttttagtagagatggggtgcaagacaggctgttctcgaacttctgacgtcgtgattcacctgccttggcctcccaaagtgctgggattacgggcttgagccactgcgcctggccaagatgggggtcttaccatgtttaccaggctggtcttgaactcctgaactcaagctattcacccacctccgcctcccaaattgctgggattacaggggtgagccactgtgcccagccaaatgattctttactttctggaaatagggacttctttccccattgttcatgctgagcccctccctaagcatgctccacagggacagtggcggaggggagaggtccttgctgttacgagcagttggcaggtgccagccgtcctgtcagctgggcagcgcttctgttttgtgagggccatgaccgagtaggatggcacgtgcgtggctgtctcctgtgtgttaagtgccctgagagggcttgtccccacggaagcatggagccggctctcgcgcaggccaactagatggatgtgctggaacaagggccgggaaggtgggatggccggagttgaagttgcagtggagatgacgtgggggccggagggaggttgggcgtcatagcctggcagctccagcttccacgtctcaccttgcctggggtctccacgtagctgtctcgtgggcgtcgcgtggggcactcccccacgtggactcttccgcctcctggccctcccaagtgtcccttccgggaggtggccttgtggctgttgagggagcgcctggtgcctccctcctggcatcactgccgtctccttccccccaccccataaaggtgtggctaggatgccagtcagacctgccggcatggcctaaagaggaggtgggcaggcttggccagtactggtcctgtccccagcacctctcccactcggctgctctgcttcgaccatgttgcctttgcagttcgcgagttcccttggctcccttctgccctgggccctggctctcctgcttccctgggcagcagcactttcctcccaggttttgcagcccccctcgttgagctccgtggcttccgtcctctctctaacgaggccatgccctcccgtttccttcgtaacttttctttgcactgtggaagtccccagctgtttgtcgtttctctccagagtgtcagctgtgggagggaagggccttgtctgttctccgtgtggcagtgccagtctcgatcatggaggcaagctgggggcctggcctatgaactcctggtggagaaatcaggaggatctgggctaattagctgggcatggtggcgtgcgcttgtagtcccagctactcgagaggctgaggcaggagaattgcttgaacctgggaggcagaggttgcagtgagtcaagatcacaccactgcattccagcctgggtgacagcacaagactccatctcaaaaaaaaggaagacttgggctttttttttttttttttgagacagagtcttgttctgtctctcaggctggagtgcagtggcacaatcttggctcactgcaacctccgcctcccgggttcacgcgattctctggccttagcctcctgagtagctgggattacaggcgcacagcaccacacccggctaattttttgtgtatttttaatagcgacagggtttcactatgttggccagactggtctcgaactcctgacctcgtgatccgccctcctcgtcctccaaagtgctgggattacaggcatgagccactgcgcccggccagatttgggcttttggtttgggagctctgtgtgctcaaggtgtcctgcgctgaggccgggctgcaagaggggtggggagtgtgagcactgcctggaacacgaggccgagtccaacagggaagactttcatggggctacacgagcagctggctgtggaaacaggcctgtgcacaagacgcatggcaggtgtgggggagggaggtcccaggggctggggcccagctgccggggccaggccttgcacgtgggcacggtgtcctgaggtcaagggatgcagagttgggtccagggaggagggaggggctgagaagtgggcaggggctccctggcggtgatggggacaggtaaaactgggggggtggagggggcaggcggggggggatgggcagtaggcctgcgacctgagaggttgtggtggggaaccggctgctgagggccctggtcagggcagcgacttggtttctagggttggagagaggaggaactagctggaggaggacaggactcagtacagagctggcatcttggtgtaagggtgcgtgaggtgggagggcctggggaggtgggtgtgtgtggggtgggctggtgaggcgtgggcgaggtctcagtgctgaggccttggttgagctgtatccttttggcagatttatcacacgtcctgatgtcaagcaaagcaagatggctgagttcctggactggagcctgtgcaatctggcccgttcctccttccagaccatgcagggggtcatcaccatggatgggacgctgcaggccctggtaagtgctgcccgcaggggctgtggagatcgcagggaaatggcgccttacatggggaccacggaatgatgttacctgtgattccatcttgacgtaattggaaccccgtgggattgatttaaccgggccagggtcttgggcagtttccttttccctctgctttgggtcctgcctcaggcagggctggtttctgcgctggtgctggtggatgggcttggagccccacctgttgccagcagagggcagtggtgccacgcagccggggctccccagggtaggtttctctgcatctgggctgcttagttcctgtttaagtgcagagactgaacgagctctaataaaacaaggtgggtgagttgaaatttgattctgttcctttgcactgggctcgggttggatgttcctgactgcttcgttgggacacagaccctggcctctgcctgcaggtgcctggttagtgccctggctgcagccctttgccagccctttccctgccctttcgctctgattgtctcttgtgttaccttttcttgtgctaacgaggaggaaaggtcaagtctcagaagagggcaaagcctcttttgggtcagcgtcctggaggctgcagctccctggtcagccttctggagggggagccggcagccggctgtggcctttggcgtggtgggttcagcgccttcttctctctttaattacagcgggtgaggctttgagagcacttctcatccttgtctcacgctgtggagcctgtggtccctctgaggagcggggcactttgttcttgtttaaaaaatatattttatagagacagggtcttgctatgtaggtcagggtggtcttaaactcctggcctcaagtgatcctcctgcctttgtgatgatcccaaagtgctgggattacaggcttgagccgccgcgcctggaaggacactttggagcgcgttttaggggagatgatgagtgccacctcgccacggcgtcctcctgtccgtggcgtcgtcctcctgtccgcagcatcgtcttcctatccgcggcattgtcttcctatccgcggcgttgtcttcctgtctgtggcgtcgtcctgtctgcggtggcgtcgtcctgtctgcggtggcgtcctcctgtccgcagaggcgtcctcatgtcctcagtgttgtcttcctgtccatggcgttgtcttcctgtctgcggtgtcgtcttcctgtccatggcggcctcctgtccgcggtgccctcctgtccatggtggcctcctgtccgctgtgccctcctgtccgcggcgtcgtcttcctgtctgtggtatcatcttcctgcccgcggttttgtcctggccgtggcaggttctgccagggagcgggaggctgtcagctgggtggaggggggctgtgggagtgatagcctggggtgggggcatacgtttcttgagggggaattgggaagtgtcctcctcaatgtctgctgcttcccggtcatgctgccgtggtcttcaggagggcagcctttgaaatgaggaaaaggtttcagacgtgtgagagaaaactgcagacgtgtttcctggagcctgtgctctgcccaggtgatgtctgttttcttcaggcgtcccctcaacctccacataaatgtgacagattcagcagttttcaaaaatcaagatataattcacataccacaagtaatttatccttctaaggtaaacaattctgtagttttctgtgcggtcatcaccattatctaacttcaggacactgtcatcatcgtgagagaaaccttgattgcaccgagcagtccgtccctcaccttccccagcccctgcagccgtggatccatgtgctgtccctgtggacttgctggttgcggacatctcacctcaccagagtcgtacacgacacagccttttgcgtctggccttcactgagcccgatgtgtccaaggttcatctgcgctgtggtgttgtcagtgcctcgttccctttatggccgaatcataagccaacgtgtgggtattttccatatgccagcgtgtgggtattttccatatgccagtgtgtgggtattttctgctcttacaaattacgctgtgaagaactttcatgtgcaagtttttgtttaaacttaatgctttcaggccgggcgcggtggctcatgcctataatcccagcactttgggaggccgaggcaggcagattacttgaggtcgggagttcgagaccagcctggtcaacgtggtgaaaccccatctctactaaaaatgcaaaaaatagccaggcatagtggcgtgggcctgtaatcccagctactccggaggctgaggcaggagaattgcttgaacctgggaggcggaggttgagtgagccgagatcatgccactgcaccccagcctaggtgacagagcaagactctgccagaaaaaaaaaacagaaaaaacaaacccaacttaatactttcagtacccttgggtacacaacactagtttttaataaaattttaaacaaaatttggaatgttttcatctttctggagtctttctaaaaagatttttctggtggcatacctgtcgtactgatgaaatagaggacctcctcatgccaggcatttttgggcattgcaggtacagatgtgctgtctgtgtccccaggtgcccctcgttccggccgtgctggggcagcatcctcaatgcctaaagaggattcattgctatcgtggaggtcagggcaggctgaggctggccttgaagggtacgggggtggaggggtagggcagggaggactcaggtctcggacgtacccactgtgccattggtccatggatcctcagggaatgtgcgttttatgttttaggcaattctggtaaaggtggtggatttagttgcaattggattcttcattttttgccttgggtctcactgaggaaacatgaagaaggggtagatggcagtggccagggtgggggtcctgggaattctggtagcttcaccttaatgtttgtgatgctgggtgtacagacagcctcccacatgaccaaggacacgctcttaggtccctaagaccccagaagaatgggccgctactgccaagaagtatgacatgcgtgtggaagaccatgagccttacccggctggtggcatggggtgtggcaactgccgcagctccccgaaccattgcagtgggaaaggggtacgtgctgtgactaagaccactggacccgacccatcgcagcgacagggggtccatgctgtgtgactgagaccactggaccccacccatcgcagcgggaggggggtccatgctgtgtgactgggaccactggatcccacccatcgcagcgacagggggtccatgctgtgtgactgagaccactggaccccacccatcgcagcgggaggggggtccatgctgtgtgactgggaccactggaccccacccatcgcagcgggaggggggtccatgctgtgtgactgggaccactggatcccacccatcgcagcgacagggggtccatgctgtgtgactgagaccactggatcccacccatcgcagcgggaggggggtccatgctgtgtgactgggaccactggacccgacccatcgcagcgggaggggggtccatgctgtgtgactgggaccactggatcccacccatcgcagcgggaggggggtccatgctgtgtgactgggaccactggacccgacccatcgcagcgggaggggggtccatgctgtgtgactgggaccactggacccgacccatcgcagcgggaggggggtccatgctgtgtgactgggaccactggatcccacccatcgcagcgggaggggcgtccatgctgtgtgactgggaccactggacccgacccatcgcagcgggaggggggtccatgctgtgtgactgggaccactggacccgacccatcgcagcgggaggggggtccatgctgtgtgactgggaccactggatcccacccatcgcagcgggaggggggtccatgatgtgtgactgggaccactggatcccgtccatcgcagcgggaggggggtccatgctgtgtgactgggaccactggatcccgcccatcgcagcgggaggggggtccatgctgtgtgactgggaccactggacccgacccatcgcagcgggaggggggtccatgctgtgtgactgggaccactggacccgacccatcgcagtgggagggggtccatgctgtgactgggaccacctggcctgaggttggactggtgaaatgacaatgttggcacctacatgtgtgtcaggatccatgtggatatgtcccgcacacctgcttcttggaatattgtgtaagcagctcttcagcttcacggccttcatgatcgtgttctgggtggggaagaattaaccagcctaccagcccgtggggccaaagcagtgtccttataatcatctgcacctggaaccaggtggcgatcccaccgtagaacctgtggctcacaggatctgaggtggcttcgagggcttctctgccctctaggattccctcatccttagaaatttaaccttaatgaaatccctaataaaactcagtgctgtgggggaaaaacatctcaggtcaggggagcaaatgggaggtctaacaggatgtgaccagagctggttgtctccaatggctctgccccgagtgtggtgcctctgcaggggaggccgttagccctgccccgagtgtgggtgctgctttgggaggggaggcaaatttgatctctgtccggtctcttaacgggcttctaggggtctcctgcagctctcgtcagcctggcctgggagcctcccctcctctgccgtccccaccccatgctgttgggtcagcaggatatcccagccttggggctggagccagctgtggctgcccagggacttgcaggcaggtgaggcgtgccaccttctggccaggctggctgtgggagaggcagcctcctggtgaggggctgtgggccactgcgttcaggctgccttggagggctccacggtgtcccctgggtgcagggctccgagtccttctcggcttgggagggtcttgtggccacatgtgtctagttctgcagtttctttgttgtgggttcggttctttactttttttttttttttttttgatgatcttgttggttttctctagattgttcccaagttttctgttcttccatcccaagtgggagacacgtgttgcacagcctgcatttggaatacccagagggtgggtgggcgggacggctcgctgccccattcccctcctagctgctgggacaggtgggaattcctgtagcaaagtcaaaccagccaggagtggggaagtgctttttattttgacatctccaagttccacgttgaggtggagagacattcgtttttccccttcctcccgaggtgtaaaacggtcttctcaaaggcttaggagagccgagccctgtgccaccccccggcatatgctggcaaagagtgaggcgtgctgtcctgccgtttagggcagagcacccaggcggtttggcagcagcacctcagaactattcagagatttgccctcagcaagagtgagcaattgtctgacgcagccggctgaaatccctgggaagggaatgaatgaaactgccgtgaagcaacgcctggcggggccgggcttctggcagctcctggggccagcacgtcccttccagagcgtctgaagccctgggcggctgctggagcatctcgagtctttccagagtcatgtgtgttgtttccttctgtctcttggaagggtccgtttggtctgatccaggttgcctcagcaggaggaagtcgtgctgggtgctgagcgggtgggaggtttcaccttgggcttggcagagctgcaggcagaggccgggcgcctgctgtacatgatgaaacttgcaggtggattctgcttagggtttcatctgtttcctttgatgcacttggcttcattgtcatccacctgttcattactgtgggcgaaacaggtgaactctcaacaagtaccatcgaaaccaggatttgatcttcatttccctcgaagcgtagttcccttgcagtgagggtttttaactcctgtgggagggaagcaagtgtttggcaatgtaatttccctggaaggcccctgtacttcagctttaaaaacacgctttggtttagtcccaatttaagcattaagattaatgcaaattgaggaaattcaaggaaggagaaaaacacattaaaaatggaaaatgggctgggcacagtggctcatgccggtaatcccagcgctttgggaggccgaggcaggtggatcacttgaggccaggagtttgataccagcctggccaacatggtgaaaccctgtctctactaaaaatacaaaaaattagttgggcatggtggtgcgcgcctgtaatcccagctacttgggaggctgaggcaggaaaatcgcttgaacccgggaggtggaggttgcagtgagccgacatggcgccactgcattccagcctgggcaacagagcaagactccatctaaaaaaaaatttacaaaaaggaaaatggctgtcatttcatgtgtgactctgcttgctgattgatagttgtgctctcttggtttctagtgctctgattggaagattgtcgactgtgtggagtgggtttctccctgtgtgttctcacaatggctgggaggcggcggcggggctgggggactcggactgcgagacggggctgttgactatgaaagtggtaataggatgctcttccccttatcggctgttaggctcgagtctcccctttgcagtgcggtttctttttatttttatcattgacaaaagcacaactcttgttaaaggataaaatagtcacacacaacagcattaaaaaccaagaaagccaaagaacgctggcactgtcagcctcactcccagctcccgctcggcccttgtgaagagaggtgctgaagccactctgcttttttatagttaataaaagcagccaggtccccaagtaggagtggttgtggccaagagtgtgtgggccgggaaccagggcttgagctgctgtgagctgtgcccaggccctttgctgactccgtctctcctgtgacctgaggccagggtgagcaccagcgcccgccccacctgggagggaagcagcagacctctcaccgcagaggctggtgtgaggctaattagcacagtcagtctttgaagatgaaagaagacagctgattatctaaaacatttcacatttaggctttgatttctcttcagatttggggaacagcaccctactgtttcatttagggttcagtgtggccagaggaagatgacccacgtggtcctttttagttgtagtgctctcttggggcaaggttttggatggagaaaataggacaagagcagtttgaatgtgggtactttccagagatcatgctcctgtagcatttgggtgaaacgaggtaccccaggccacgctggttcggtctcctcgtggcgttaaggaaagacctggagcagccagctcctaacactcatttcccatcactcagcattttatgtggggcgggcacagtgccgtgagtcttacagaaacctgcatggtgagccgcacgcctttgagtccccatcagccctggcccatccctgctgaggtggcgcgacctgctcacagacgtgtgctcacaggcagcccgtcgcggggtcatgtgctagacggggagggggcttggcgggtcaccagcctcaccccgctcagttcttagatgaggaagagacaggcagagagctgggctgggctgctgctgagtgggctagagctgggtctcagtggcccctgccccagtcgtcctgacctgtggcccctgtgcaggttggggtgcccctgccctctcccctgccccgccctcacctggctcacagacccgtgatgcctcactgcccacgcagtcaccttagaggcaccttccctctaaggcagatgtccctcaggctttggtcctggctgttgatatctcagctctgattcacccttgacctttattacctgatttctgtccttggttctcgagccctccttctgtggacccgttgggtacacgtgtgacacttcagaacccgcaagtcccaggtcacacctgttgtaccatcactttcccctcctggcctgtttacccgggagcccagcaacaaatgggagcttctgtgctgctgtccgtgcatacggcccaggagccgggctcatccccgagacgccgtgttccctcccgctgtccgctcacacctgcctgtgtggacgtggctctgacatgtctccttcctggttcattgctcatctgttctcatgtggctgcgccgccaccctgtcctgggggtccttgtcccagcacgtggctctgtgcttcacgtcatcctgagtctgtcccgctctgccgcctggtccaggtgggagccatttccttctgtgaagtgttccctctggaggccctgggctccccgactaccctcccgcctctcctgtggctgtcggctgcagtaaaggtgctggtggagggtgtgagccatccattcatagagtgccagactctgtcccatgctgcctctgtgcccttgatcctggcagcacacctgctgtcctgtggcctgcgtaaagggtggcctcggaagcctgtggcctgggtaaagcgtggcctcggaagcttgtggcctgggtagtgggtggcctcatcttggcctcggaagcaggagggctcaggctgtggcccacgcctggggttccccatccccccgtgtgtcctggtgtctttgcttggctcgccggcctccatgggctccccaggtggcaggtggctctcagccatgctctccgtcctcatgcttgtttctgccctggcagagctgctcagtggccagcccgtgggacccctgtgcaccctgccgcccccagcatatgtcagcagcgccgtccgggggagatgtggcatcagcacagccttgtccttgtctctgcccgttcttccttccttgcctctatgtgtctgcttttttctcttccacatggtgtccacagtggataaccacatccactggcctcctggttggtggatcctcctcctgctgggctcagagctgtgccacccccacctgcactgcagagaagctcagacccctctctgacctcagacgctggagcctgagccccctgcttcccaggccaatgccccttcaggtccctgcaaagccactgctctttgtggtctccctgccgccgttgccctccctttgccgctgagcccgtgggctgcttggtggcttgggagctgcatacaattctattttgtctggtttgttttcaggctttctgtggcaggaattgtgtctcttgcatctttttttttttttttttttagacggagtctcgctctgttgccctggctggagtgcagtggcgcgatctcggctcactgcaagctccgcctcccgggttcacgccattctcctggctcagcctcctgagtagctgggactacaggcaccctccaccacgcctggctaatttttttgtattttagtagagatggggtttcaccgtgttagccaggatggtctcgatctcctgacctcgtgatctgcctgcctcggcctcccaaagtgctgggattacaggcgtgaaccactgtgcccggccatggatcattaacctcttttctagcatcttacctctgtggtggttcacttttgcgagcttttgctgggccttggaaggtgcgtgggctcgctgctcctctcttctgtgggaactgttgcctttgggcagggggcacaccccagaggtggtcacacacacctgaacgggagcacagtcataagtccctgtcatgcaaagatgggctgtgcagaatgagctcggaatagcagccagaaggctcagtgatgggggagttgtttaagctggaatactgtaatgctgctggctgtttatggctgtgaggtcactacgtgggctgctgagaacattttaaaatgctgagtgagtcatgaaacagtcatgcgtcccctaacaatgagggtagtcctgagaactgcgtcgttgggcagtgtcgtcgtgtgaacaccgtagcgtgcacttaaacatagatggtgtggcctgctgctcccaggccaggtggtgcggcctgctgcactcccaggccaggtggtgtggcccgctgctcccaggctgcaaacctgtacagcacctgactgtgctgaatactgcagggaactgtaacacagtggtgtttgcacatctaagcatagaaaaggtacagtaaaaatatatcatcagctgggcacggtggatcacgcctgtaatcccagcactttgggaggccgaggcgggtggatcacgaggtcaagagatcgagaccatcctggctaaaatggtgaaaccccatctctactaaaaatacaaaaattagccgggcgtggtggcgggcgcctgtagtcccagcgactcgggaagccgaggcaggagaatcgctcgaacccaggaggcagaggttgcagtgagccgagattgtgtcactgcattccagcctgggtgacagagcgagactccgtctccaaaaaaaaaaaaaaaattatatgtatatacacacgtgtatacatgtgtgcacacacacacacacatatatgtgtatatatatgtatatataaaatccttttatgggctcactatcaatatgtggttcctcattgaccagaatgttctatgatgtaggactctagtgcgatacactgtcatgaacagattgataaattaggtgaaggatgatgcctgtgaatgacagacgtaggaagccacaatcattttgtgttttccacactctctttgagagctgtgttgccttggtttatggatgaggacatggacccaggtcaggggctgccaggtcggtgctggggtgtggagctgggccttgcatggcccccacctgtgaaggtaattagtgtttaccttacagtccaaagtttggtgaaaaataacacttcgttctggaaagataaaagctagatgtgattatttcgatcattgaagcatttttgtgtgaaattacctttttttttggcgtcagtggcatgatctcagctcactgcaacctccacctcccgggctgaagtcatcctcccccctcagcctcctgagtagctgggattacaggtggacgccaccacacctggctaatttttgtacttttagtagagatgaggtcttgccatgttgtccgggctggtctgggactcttaggctcaagtaaccctcctgccttggcctcccaaagcgctcggattctaggtgtgagccactacacccagcctgaaattagttttcattttgatatttgttttcttaaaattctttataatttgtcagaaatttattttgtcagaaacagtatattttttcactctggggctctgattctaatcagtcatttaccaatccagcaatgaaagttttcacttccgtcaatggcttttttcctctgaatgtgtggtggtcctgaggggagtgcattttgctcgctcctgggggaggcagtggtctggcctgtccccaccagtgccccctaggccccgccttgaggacaagctctcttctgtttctgagcgctctcccgtcctgtctagggcaactgctgctctttctaggggtggtagtggggctctttaagatgtccctcgctttgatttttgcaggccagcaaatgcactggacgttgtggtttttctggcctccagtagtggtgtggtgggaaggttcttttcctgccctgctgctgaggggagcctcgagcgtaccagagttcctcagtgaagcctttgcacgtcctgcagggtgcagcccagcatgggtttcactgccctccaggaaaggcctggccctggtgggctcgctgcagcacaggcacggacctggggctgtgctctcaaggcattccagcctggaaagggttgttttggtgttaaagatcctcttccgtgcctgtcctgtggcccctctgtgtggcatgcccaagagtggctttgaacatggctgccctccgtgtgctgagcctgcgggggcacggctaccctccgtgtgctgagcctgcgggggcacggatgcgattggttgcttcccaagataccatttcttggtgtcggagcaggactcgggatggcagaaaggggaacagactcgctctcctcatctgcagagtcggcatggttatgtggggccacagggtgacccgctggcctggagctagcgtggtctcagccatctgcctcagtgccggccggcactcacagcttctcagaagcctgtgttaccagccagagccaagcctgaactggtgtggtgtgggggcccttctcccagggcctcgggtggagttgcttttcttggcctagatttggcagtgcctgaagggagcctcaaaccagcatctcctgcttggcagcgggtgagcttgctcccgagtagctcgacagcctgtgatttactgggcttggagaacatgccccaggggggggaagctggctcgcacgttgcagagaagccagcttgggtgggtagccatcgaaaggtggggcgggttaggatgattgctgagaaactccttttgtttgcagcttgtgctgtgctggtttctagaacaacaaaaacagacctgcagtcattcctcatttaccatgcagggctgttttcctctaatccctggtgtcatcacctctgtctagtgtatgcttttcagcaggtggttttaatttggttcccattatgcttccatgaaagtgggctgtgccccccattttatggcctagcttatgagcactcaagaccattgatgactagagtgcgctctctctggccgcgtcctcctgctgacaggtaccccatcccaccgccacgctgagcactggccactgcacactgcacactttctctggtgaagatggccttacttttcagtgaaataaatggaaacaaagccctgtcttcattgactcgttccttccctgtcgtctcttttgccctcctgcacccatgcctgggaaagtggataacttttggggcttttctctgtgtgtgctgaatgcccaggaggctgcctgtgtaattcagctggaaactgtccccagggtagagagaagtgtgaggagaaaaagacccttcgccctgtaaatgtgtggggttctggtttctcccttactgcagatggtggcgggccctggccttggtgctgtctcctgtgtgtagctggggacggtggaagctgggctgggcctttccaggtgtggggcatccaggccagttacaagagatgatgcttgctttcccgagaactcatcaccacttgtatcttagtctgctgtagagaatgttgtactacacttcataggaattgagtaactaaacaacgttcatgtgtgagggcactctaggaatttcacagtgtcttggattctttttatttagtgagagaaaccagacgacgtgttagcccgttgccaagtaagactgggggacacgtcagcctgttgccgagagagaccaggggacatgttagcccgttgctgagagagaccgggggacacgatagcctgttgctgagagagaccggggaacacggtagcctgttgctgagagaggtcatttcccggatctttgtcctgcgtccgcccacagctgcacagctgctcttctggtttaggttctggcctttcccactggggttttccagcagcctctgtagcggtcttcgttgttgagcacttcactgttcatccccaggttctccatccagctgctgttggaatctggtcatgtggccatggctgcaggtgatacggtggtgctctttgcctgtaggatgagatttcagccgctcgcaggttcatttgttgtggaacaacgtactccacagctggtggcatcagtgacagccgcactcttgcgtggatcgattctgtggcctcgcagggtggggtgcagggggccgtttgttactgccctttgatgcctgggcctctgccgagaagaccacgtggcaggtgccttgaagggctgggtgcggcaggggcccttgactgaagctggctcttcctgcatggcagccggcttcccggagggagtgtctcaaggggaggtgtctggagaggccctgaaagaggccgccaggcttctgacctgggattgggggtcactggcatcactcctgcctgcctctgttggttgtggcagttggaagcctaccaaggtggtgggtgagggacccttgattgtccgtctggcaaactctgttccccactgagctggccagccggctgcagtgacagcttctctgtgaagtgtcttgtcttcttatcccccaggcgcggtccggcttctcgttgcacactggtgggcttcaggccgtcagcccacctcccagggaatttgagtgtgtgcttggccctgcgactgcccccgaaccccgcgtcccgttgcggggagctcgcctgtgccccacggtttctgctcagcaagtgttggctctgtaaaccgatgacttagggttaaaacacatattaaattagatacatctggactggtgtgaaataatttaactttcgattttatatttcacacaaactaaagatggggaagagttcttaaagttaaatgagaacttgttttgggcaaacaaggatcatctccattcacttggtagggaacgtgttactatccatttcgctaaagagaaaggggctaagtctctgatcaccttggtgaatgtgttattctgagtggctcagggaggtgggtgctgccactgccccattttacagacagaggaacaggagcgcagagaccctgctctgctccacaggcgtgactggtggtctgtctggctgtctccttcctgttttgatcgtaggtgtgggatctgcaccacaggtgtgactggtggtctgtgtgcctttgctgcttctccactcagcgcttaggagagccccccagcgggctccatggagagagtctaagttccctctccttttaagaagatgtttctattctacacttaagtaagagatcaggcagtttacagggttcataatgcaaataaaagacaccagtatttagtgaaagcctcttcaccttgtctgagcatctcctgatgggcggcacctgcttcttcatttttccgtgtggtgggcgacagcaggacaggggtggcgtggtgtgcggtgcagatagtctgagacagatgcagttctcaccttgactgtgaaattctgttttctgaaggaaaggaaattcattcgcgttttcttagaagggctcagttctaggattcttcgattatgaggcttggatatttatgtgaatcatcgcatttgtcctccagactttaaagcagaaggtaaaacctcaggttgagaattcaggagggctagaaccagtgtttgagagaaaatctgatattcctgtttggtctgatggactccaggtgatgacgtccgtgtgtgcgcatcgtggggaccgggctgccaggtgtgtgtgtgagacacgggctgagctggtcacccttctcatttgttggtgaagcatgaatgcagatggaggcctttgtgtgaggtggtttggcctgtaacttttatcctttgtaactttatttatacgcagataatttttaaaaacctactgagatatcttctttttccaggctagtagtgccctgaacttaaacctgggcacgttttgtgatgccattgatgagggaggggtggagaggctgcagtctccatgaggggactggacttatcattgcatccctattttcagatgaatttttgggagatgatttcactagtctcttataattactttatcatgtacagaaactgttttctttattattaggtggtgagtgtttagaataaaaattctgaaagatgtgatgaattgttttcacaatttgtgtgtatgttttaaacttctatttgtatttgtaacattaaaaatctttttttttttttttaggcacaaatatttaaacatggaaaacgtgaagactgtttgccctatggtaaggtttatttttaagagacgatatctttgtgatgtgagtttgctcatatacaatcaagtgtctttccttaacattttattcatagatataggaactgtacattggtatgtttggacactatcgttcttttttttgttgtgggttttagtaactgaacttttttttttttttttttttttttttttttttgagactgagtctccctctgttgcccaggctggattgcagtggcacaatcttggctcactgcagcctccgcgtcctgggttcaagcaattcttctgcctcagcctcccgagtagctgggactacaggtgcctgccaccatgcccagctaatttttgtatttttttttttttgagatggattttctctctgtcgcccaggctggagtgcagtggcactatctcagctcactgcaaactccgcctcctggattcacgccattctcctgcatcaacctcccgagtagctgggactacaggtgcctgccacaatgcccagctaattttttgtatttttagtagagatggggtttcaccgtgttagccaggatggtctcgatctcctgaccttgagatccacctgcctcggcttcccaaagtgctgggattacaggtgtgagccaccgtgcccggcctaatttttgtatttttaatagagatggggtttcaccatgttggccaggctagtcttgaactgctgacctagtgatctgcctgcctcggcctcccaaagtgctgggattacaggcgtaataactggactttttgtcactttcctagtcctttgataaagagggattgctgccaggggtctcgtgagggaggtctgggcaaagcccgtgtcatgatctgaggttggacctggcttcttggggcccaggagcagccatgttcctctgatagccacagccaccacctcttttgccttcttcctaattctcttaatttattctttttgagactgcatcttactgtgtcgcccaggctggaatacatgacacagctcactgcagcttcgacctcctgggctcaagccatcctcccacctcagccccctgagtggctgggactacaggcgagctctaccacgcccggctaatttttttagcagtggggtcttgctgtgctgtccaggctggtcttgaactcctgggctcaagtgatctgccctgccttggcctcccaaagtgctgggcttaaaggtatgagccaccacgcctggctcaattctcttaattttagattgagcctcaatttctgaaaataagggcagtgtttttctccacgcagaggtttaccatctggaaaaagagaaacttcttagagcctttgtgtgttttagaagctatccggactgggcgttgtggctcacgcctgtaatcccagcgctttgggaggctgaggcgggtggatcacgaggtcaggagatcgagaccagcctggccaacatagtgaaaccccatctctactaaaaatacaaaaattagctgggcatggtggcacatgcctgtaatcccagctactcgggaggcggaggcaggagaatcccttgagccagggagttggaggttgcagtgagctgagatcgcgccacagcactctagcctggcgacagagcaagactctgtctcaaaaaaaaaaaaaaaaaaaaaagaaactatccgaatatcaaatttgaataactttctttttttgaaagtttttcattatggaaaatttgaaacatgtataaagaagagagaatggcgtgcacgccccgtgtctctctcaggagtgtgcgagttttcgtgtgcagcctgtttcatccctgcaccgcacaggagggacacacagtgccatctcacctgtgtgtacttccatacatgtctctggaaggtggggctctttatgtcctcaccacacccgagaacgcgagcagccgttgccaggccctgtcggcgggaggagcgtccttggtgacgtgaacacagacctccctcttgggctgtcgtgcttgtcacccacgctcattgtgcccactgtcagagccttctgagaagttactcagatgctctttcagctgacctggttttataggcaagcattatgagttaaacggcacctctgcccgaggtcacggcacccacataaaactggtgaacgttcactttctgtcatttcccagcctcaaggcagagcttcctgcagggcactgcagctccagcccccatccccctgctctgtccccgccccactgccccttcctccatctccttgtcttccatcacctcacctaactctcagctctgtcttcagcttctcttcttttctcctgtcccctgtcagttggttgcagtcttgtccatttcacttccagcccatctctgaagccgccatgcacttccaccccagcccttgtctgtcccgggaatgctgtcctcctggcctcagcttgccctcgtcgcagcacccgggcgtctcctgctcgcaggctctccctgtcgtgctgtgcccagtgctaccttgagcctccccttggctcagcctcctgtcctgctattgtcatcactgcatgacaccgagtgattccccctgaaaaacagagcaagccacaggaaccccgtggcctgtgtgttctccccagccgcagtgtgctccatggcttctggggttgctgcagtgtgccctgtggcctgtgtgttctccccggccacagcatgcccgtggcctgcgtggtctctgtggccgcaggatgcccgtggcctgtggggtctccgtggctgcagtgtgcctgtggtcggttgggcctttgtgtgtgctgccccccttcagattggctccctgccctctgagtacttgctctcctgacctccactgatgttgcttcacagcaaggaagtcgagtaggttcaactccagcagctcttggttcatgatttgggatgatgggggtcttggtgatgtctcctgcctcaaggcccctgtggagccggctgttggtttcggggacacaggtggtgcagtcagaagatgcctgcagcccttcctgcgctgagtccagttcttgtttgcagctgccactgtcctcaggtgcctcgatggctgcagactccctgagagcaaccagaccctgctgcggaagctgggggtgaagcttgtgcagcgactggggctgacattcctgaagccgaaggtggcagcatggaggtaggcaccatgagggcggtgcctggggagggccacggggtggggaggggttgctgtggggggcaggcgccattgatgagggcggggcaggtgctgttggggcaggtgctgtggggaggcagtcgccctgttgcggggtgggggaggcaggcgccatggggtggggaggcaggcgccttggttctggacacagttgggggcactctctggagggcaggccgagccgtaggtgagcgtctggtgtggctggtgctgtggcttttgtgtccagtggtgatggcagagaagatgtgttagtaacaagtgttttctgctttcattcatttctttaatcctagaagtgtttctgattttgagaggaatggttttcttttggttattttctgactgcatctcccagttggaagaactgcagctggcgttggcaggaaggtggcgtgtgcgtcgtgtggctcggagtcagcgtggcaggatggcggcgtgtgtgtcgtgtggctcggagtcagcgtggcaggatggcggcatgtgtgtcgtcgtgtggctcagggtcagcgtggcaggaggctggcgtgtgcgtcgtgtggctcggtcagcgtggcaggagggtggcgtgtgcgtcgtgtggctcagagtcagcgtggcaggagggcggcgtgtgcgttgtgtgggtcggagtcagcgtggcaggagggcggcgtgtgcgttgtgtggctcggagtcagcgtggcaggagggtgacgtgtgcgtgatcgtgtggctcagggtcagcgtggcaggagggcggcgtgtgcatcgtcgtgtggctcggagtcagcgtggcaggagggcggcgtgtgcgtcgtgtggttcggagtcagcgtggcaggagggcgtcgtgtgcgtcgtgtggttcggagtcagcgtggcaggagggcggcgtgtgtgtcgtcgtgtggctcggagtcagcgtggcagcagggtggcatgtgtgtcgtgtggctcggggtcagctcagcctccctggcgtggcagcgtgtgtgcgtcgtgttgctcagaggcggtgcggcctccctggtgtggacgcgctgtgggggaaagctgcatcggatcagtgatgagtctgaatgacaggctccctttcaaagactgttggagaaagtgaaaccgcctttcttgctggcagaaatgatgtcttagcagtctgtagcggccggtgtgaacgggttggttctcaaggagacagacttttctagtgttcttagggtgctgtgtgttagcgaccttcagtttgtttcaagtgctataatacgtgtggtttgggaaggaattacttggttaaggtcagctcacactccgtcctggatgatggcaaattccagagacgcgtgttgtgttgcagtgttgggtgtgcagctcactctgtaggaagttgctcattaggcacagtgttcgtggctagtttctcaaagctgctgtggggaatgttcagtgctgtaccaggcagggttctccagagaagcagagcccataggatgtgtgtgtgtcggcgaggctgtgagctggagaccaggagagctcatggtggttcttggccaaaggcctcagggtggagacccaggaagagctgattggttttagtctgaagacagaacaagtccagttgagagattgccaggcaggagggcttcccccctcctcagggagggccggcgttttgttctgctggggccttccgctggctgaacgaggccccctgcatttggcagggtcctctgcctgactttgtctacagattcacatgctggtccagagcccctgacacaagcactggaagcaggtgtgatgaaatagcggggcgccccacggcgcagtcaggttgccatgtaaagttaagcatcacaagcactgaaatgttggtacagaaaataatccagtatcctagttctctcgataatgatgtgcgtgttgccacatacacttcacgtaattctaacgtggttgggttttagtccccgtcttgtgtttttctcttccgtctttctctacgtttcctgtatttctaacttttttccatttttatctcctcggttggattttcgttgtctctgttagtaccgttctcttcttggttgtcttctgttgatgaggacggacttacgctctgacgggctgttagatttctggttcatcccactcctcctgccagccttggctcgaggctttgttagggtgggtctttctcagctcttttcctccagggattggtctttcctccacagcatggtccttgctttaagtatgtagcctttcagggacttaggtgaaagtcacggctttctctcccgtcctgctgggcccgggtctccggggccctctgagggttgcacagtctccaagttctctgcggcactcggcctcccagccattctctgacaggtgcgtctgagtctcgccttgtgcttccttatcttggagtgcccagggatccaagggaatttttgggcagagttttgggcctctgtctcagcagctctcttctccccaacatcctctcccccacatatgagccctccactcattgagattgctgcttcctgggctgtttccttggtacggtgtagaaagtacccctgcggggaggaggtggaggtggcccacctgcagcttcccctcgctggggattgttgccctgccttggttgccatcacctgctggccaacagtggctttaagtcttccgtccgagtctcaccattgttgaggtcgggagggcatgtgtagaagcagcctgaggtcattgtctttgtggtgccgtctggtctttgtgaggtggctgagctgcgcgcttgcgtgaggagaatggcggctggggtgcaccggtctgtggggcgttaggggagactgggggctggggtgtgccagccatgggccattaggggagactgggggctgaggtgcacctgcccgtgggacgttaggggagactgggggctggggtgtgcctgcctgtggggcgttaggggagagtgggggccggggtgcacctgcctgtggggcgttagcggggagtgggggccggggtgcacctgcctgtagagtttaggggagagtgggggctggggtgcacctgcctgtagagtttaggggagagtgggggctggggtgtgcctgcctgtggggtgttggggaagagtgggggctggggtgtgcctgctcgtggggcattaggcatcttgctgggtgtctgatggtctccgccacggtcctaagatggctgatgatactctcttcataccagttaccctacattacagtgtaccccgaaatttagcagcttaaacagtgcactttttcctcacagttttggtgggtctggaatcttgacgtggctcagctgggtccctggtcagggtctctcctgaggcttcttaaacagtgcactttttcctcacagttttggtgggtctggaatcttgacgtggctcagctgggtccctggttagggtctctcctgaggcttcttgaaggcgccggcctggccactgccgtctcaaggcctgcattgctggggggtgtgcttccatgctcctcatgggttgctgtcgggacccggtgccttgtgggctgttggtggggacctgtttgaagtccttaccatgtgggcccctccgcagggcagtgcacagcatggtagctggcttcattggaggctgagaggcgggtggaaaccacggctgtttggaaggtggcagctctcaccagactctgcgtattctgttccttgggagggaatcattgggcccaggccacaccccgtgtgagaggaacgctaggcggtgggggtcgtgggctgtcttggaaactgcccccctccttgtttcctagacttggaaactgagtcccagagggctagagctaggatgagtcattcgaagcaggttgatggcatcagcaccagtgtgtgagttctggttctgccgccaaagcctaagctgtttgtcctctgggaggctgtctcaggctacagccgcagcagctgccctgaactctcactggacaccttttctgcatgagaccggggaagcagggcccacagccaggcggcccgccctgcactcacccttggcaggagcagctgtgtacgcgggggccttgctcagcgcagggctgggctgcacgccgagcgcagactctgacggctcctcacacagctctctgcgtaggactgcgttcccattttatagagggggaagtgggggcatggagcggctcaggagctgttcagaatcacacagcaagtaggcgtagagcaggcctgaccaggagccaggtcccagggtctgtgccatgggccccttcatggcgtgtccaggggatgacaatgcaggttccccatgtgggtgtgaagagggctacacgttgctgccttttgaggggcattcgggaggcaggatctgtaggaactggtgaccggtgagacgcagcacctggtgatgaaggggcggtgtgtggcctgggcggtggcagtggtggccgttcaggaaggggctgccaggaggcagagggtcccgaaggccgggtgcttccccagggaaggcgctggtcctgtcgtctgtgtacccatcatctgccttctctcctgactttccctaatcaaagctggacactagctgaggatgttctggactcggggcgtgttttgtggcccacaccaggatcttcctggcagtttgtgctgatggcactgcctccaggttctcccttcttatccggtctctgcaaagtgcatggaattttcacaggcacgctttaagattcaaagtgacactgaatgactggttccagtcatcaggatgctgtgagctacaaagctgatctgaggatgctttgctttgcacaggtaccagcgtggctgccgatctttggctgcaaatctgcagctcctcactcagggtcagagtgagcagaagccactcatcctgaccgaagatgacgacgaagatgacgacgtcccagagggggtggagcgtgtgataggtgcgtggggtctaagcggcggcctctgctcttgggcaccgtcgggccaattcccctctactccaggaccacacttccttcttccttgctggtgccggcactgtctggccacccgtccccttcgctgagtgcacggtcactgcccgtcctctggctcctgaacccaggcctgtccctgaccatggacagtctcttcctgtgtgccgtagaagccctttttcccaccgcctcgcctccttcctgacctgggctgcctgttctgggcagctgggtgtgtcctcaggaaacagttctcccaggaaattgagttggggtccctggggctcaggtctctggctccttggcccctaaaccctgctcagttccttacctcaggagccatttcaaactcccttaaaccacattacaccttgcaggggtctccatccactgccctgttctcctcctgtggggtctcctgctgcacagagacagagccatcagcggagcccctcatggcggccatcctgggctcctgtccacacactgtcctgccctcctgccgcggttggatgaagtcttccctggacccaggcagggcctcttcatgtcccctccctgtgaggcccccatcctcccagtatctcccagcttcctgatgggcaggcggggccacgctgcctgtgctgtgctgcactctgctcacatccccgccgctccctccagggcaggtttctccccagtcatctgcaccccacctcgaccgtgaccatcagggcgcctgtggcaccgttgccagccccgagccagcatccactccggcccttcccttgacctttgcttctcagagccctccctggttgcgtggtaggcgcccgcatctgtgctgggcggctctgagtcccgggcggggccctgggtctgccccttccccgtgtccgcagcctgccccaggttcattcccgtctcccacccgctgcaggcagtcccccctgcccgcattccagctgctgtgctggctccagactgtctctccaccctcccctgtggtcactcagcgagcttgtccatcagggtcttcccagggctgcttggtgcccacaggcgaaggcttcacccttgctggggcttgcagggccctcaccgtgtgacctgacccctccctgcatcctctaggcttctgtgtggttcttaaaagttcagcctgccgccaaggcctggtccctgggagagacgtcttcgtgcagccgctggctgggggttttctctggaagcttcccagcccactttggtcacccgtgagctgcgggctcttcccctggcctgggtggggcccttgatgttggccttcccctgggggcaggcagctgctccctgtagccggctttaatggggtagatctctttcttaggaacagagaacttgggaacatggctgtatgtgatgatttgagaacggagggaaggaaatgttcttttcctgtcattaaaattaatattgttaatgtaattcccttcggcgtgtgcactgagtagcgtacaggatgggtcaccttacagctgggaaactaggaactttgtgtggactctgtcacgcatcaccttcctcttcctacagagcagctgctggtcgggctgaaggacaaggacacggtcgtgcggtggtctgcagccaaggggtaggtgtctgtggccgcagaagcaccccggggggtgggccggcctctcctgtgcgattcagcagctacaaatacccaacagctttggagtggcagcgcggccccctcctcggccccctccaacttatgtgtgttgctttacgtgttggcgtgaagatggttcccgaggcggagcttcggtctcctccgtcctcctgcctctggctggccctgccgggtcacgagcaggccgggtttacctgtttatcttcaaaatgttcccttgcttttccacatcctcatcactgtgccccccacctatcgttccccacagatgggggtcacggctcctacaatgacggtgctcagggaagagccctcttttgtggggtgagcaggtgccagtccctcattcacccctcactagcacctgtcatacctgtgggagtcgacatgcaccctgcaccccaggcctcagtggaggtcgtggggcagatccagtggggcctggccttgaacacaacaggtggagccctggcctggaggagccggtggccctgtgggctcgggctgtgcagggacagcgatacacgtgaagaagatgctgaagtgtcggggaggcccctgctgtggaggagaggaggcaggtgcaggggccagcaggtgctgaggtgtcagggaggtaccttctgtggaggggatgaggcaggtgcaggggccagcagatgctggggttgggggaggcccctgctgtggagaggatgaggcaggtgcgggggcagtaggtgttgaggtggggggaggcccctgctgtggaggggacgaggcaggtggaggggctgacaggtgctggggggcggggaggcccctgctgtggaggggatgaggcaggtggaggggtggcaggtcctggggggcgggttggcccctgctgtggaggggatgaggcaggtccaagggctggcaggtgctggggggcagagagaaccctgctgtggaggggacaaggcaggtggaggggctggcaggtgctggggggcagagaggcccctgctgtggaggggatgaggcaggtgcaggggccggcaggtgctgaggtgtcagggaggtccctgctgtggaggggacgaggcaggtggaggggctggcaggtgctgaggtgtcagggaggtccctgctgtggaagggatgaagcaggtggaggggctggcaggtgctgaggtatcagggtggtccctgctatggaggggacaaggcaggtggaggggataaggcaggtgcaggggctggcaggtgctgggggatgaggcaggtagaggggccagcaggtgctgggggacggggaggctggtttttgccattgctctcccatgcgtctgtgctgggtccgtccataccatgatctctgggaggagctccacagggctgtgcaggggctcacataggcctttgtgttgctgtacgcaggggatggcttttcagcccagagcctcgtctggttgggtgtgatgggcccacgcagtgagaggctgggcaggccttcccagtgtccttcctggaggcccctggccaggaccttccccacggggccatctccagggacttggaccctgtgagccagcctcaggcggcctccatgtggggccgtgagcccatcacctggcctgatgggtgcctgcacagtcagcgtttggggtggcacagaggaagcccggctccagtagggagggtcagggtgaagccctcagcgttcgcctgctgcctcggtaccctcagccgtcactggtggcctgcagcgtccgcgttacagtggtacatggtgacctaccctgtgccgcgtgtgctcactcgtcccctttgaatctggctgcaggctcctttaccctgcagcgtgttttagcgcgggggctccaagcagggtgcgggcttgcctggagttggcctcttctctcctggtctctggaggaaaggatgggtgttcaggccattcacacgtgtcacgcatgcccttggcgacaggctggtggtgcccctgacggattgctgcgtttctctttcagcatcggtaggatggctggcaggcttcccagagccctggcggatgatgtggtcgggtctgtgctggactgcttcaggtatgtgagaagagcaggggaggcgtgtgggcctgaccctgagttgagaagccctggctttccttatatcctttcacgcttgcttttcattgagctgtttgtcagaactccagaagctcttttttcccccttttgaagttaaacttgagaactcttgttatttctggtatgttgcttttatcaattccattctatttaaaaaccttaaggaaaaagagagtcagtttagacatatacccatgtagatgtttattctgaaaggaaaagctctactgagtgagttggggctgctccgagagctttctgtgggaggttcgggtctacccctcgcctacccattagccacgtgtatcactcagaccttgaagtgaggctggtgtgaccaaggcctgagtttgaattggatttcattttaacgaaatgtgaggctttgggaggccaaagtgggaggacggcttgagcctgtgaattcaagaccagcctgggcaacgaagcgaaaccccatctctacagagagttaaaaaattagccagacgtggtcccagctactcgggaggctgaggtgggaggatcacttgaggccaggagtttgaggcttcatgagccatgatggtgccactgctgcactccagactgggcaacagagtgagacccggtctcagaacaaaactgagtgtagacagccacgtgtgctgtgccgcatttctcttgtcagccttcagggagttctgggtcttgggaccgtgtggcttgtgggtggtaagttgtgggctgggatgtgcgggtggcagggcctgggatttcagcctggggcctgcagtcctgccctggtgtgctcacacgtgtgaggcatcgatctgtgacctccccagggaattctcccttttgcttgtgtaaatgtctctcccagtttcagaagcggagggtcgagagcaggcgtccagcttgctcaggaccccgggcgtgctgttgctcttcattagcctggacaccgtggcgaaagctgtgctgtcagcactttggaggctccagttcgcgttgcctgtcagtcaccagggacagctccggagccgttcacaaagccttgttttccttctggaggagatttcttgtgcacttagcctccagcctgctcagtgacaatttcaggagcacaggaaacaatgtgtcagatacgggtcatgtttttcagagcagtgtgcatgcatgtgtgagaaatattcttccagtggaaacattgctagcagaaaacatgctctttaccacaactgcttgatgggaggcaggggttggagggtgctacgtgcttggcttctctgtaggcgacctccagccttgtttcaggcgtgtccctggagctcctttctggtggtcatggtgggcatatgtcctcctgtcgcctggtgccacctgcggccttcacaacagtgtggtgggctccaggccgggcctgcctgtgcctgtctggactttgcctctctcctccagccgctgggcggcctgctcatcaggcctagtgcgtctcctaaactcactgtgtgtctttccctccacaacgtgcagcctctctggactgtgtgttccttactctagctcaccttcttggtctagtttcatttttcctggctggtttaatcttcaggtgctttttaacctttatttttgttattttaatgtgctcattccatttttgtagctaggttctgggacggggtggcctttttactcttgatttcgcagggccttcatcccaaagtagctgcagggccatcatcccgagtcctcgcaggatgcagctctggtcagtgcctgccttcccttttcctgggtgctcagtgtgtgattgtcaaccgtggcataaaaaggcggctctggacagcgcctgctttccctttcgctgggtgctcagcatgtgattgtcaaccatggcataaaaaggtgcagcctcagagcaggatgtctgaagacaccaggaagccaggagttgctggggtgtggggcggcccacagccctgcatggtggctgctccaatcttgtccttccctgggacgtgtggtaagctgccagcctcttctgaaacgggtccgagaaagggcattaattatattaactgtaagaacacccagcacccaggagggttaacttactccccgctcctttcctgggctgggttatgcagtgagtggaactgcacccatccccagggggttcaggatctgtgtggctgatgtggctgtcccccaagcgtgcacgactccctcaggacctggggccccctcctgactcccatcaccagccctgcagcattaccctggacctaggaagtagcgccagaccccaggctgtggcagaagcagggtgccttggagaggagtgtgtctgtgtctgtgccaaccccattggtttctcccgtgagcaaaccaactgaacctgtgcccgggcccagctgtgggtcctgctgacttgcccgagggcatcttctgagacactcggtgtggagcgtctggaagccacggcactacgctgtgcctccccctcgcccgccgccccgtgtcagcaggagcctcaccacgtgggttcctttctgttgagctttacggtttcatcgaggttttggactgggtgatgtgttcattcaaaagtcaaaccaaagggaagaagacagcctccccagaccccagagcccccccgcaggtgacctggggcacccgtttcgcatccctccggggactgatgcaggtgtgagcagatggatacagaggttttcttgttttgtttttgagatggagtctcgctctgtcgccaggctggagtgcagtggcgcggtcttggctcactgcgatctccgcctcctgggttcaagccattcccctgccgcagcccccaagtagctgggactacaggcgtgcaccaccacgcttggctaattttttgtatttagtagagacggggtttcaccatgttggccagtcgggtctctgtctcctgaccttgtgatcagcccgcctcggcctcccggagtgctgggatgacaggctgagccaccgcgcccggctgttttgtttttagagatggggtcttgctctgttgctcaggcaccatgatagctcactgcggcctctacttcctaagttcaagtgatcctcctgcctcagcctccgagtagctaggactataggtgtgcagcaccacacctggctaattattttatttcatttttgtagagatggggacttgctatgttgcccaggctagtcttgaactcctggcctcaagcagtcctcttgcctcggtttcccaaagtgctgggactatagacctgagccctgtacctggctaaaattgtctctttcattttacacagataatggcttacttgtcacactttaacaccaaacgcatctttgaggtcattttacattagtgctgttccccttgctcttgatgatctgagacccgtgtacctgcgacactctttacccgcctcctctctctctctctctcttcctctcccgctcatccgcccactcatagcttccactattttctgttgtcttccctcctctgagaccccccctgtgcttccaggagtgccttaagcttggatctgagggcgggaactcgccccggctgcttggcttctccctgtgcccctggtgtccatggacagggtcccctgtccggttccactgtgccgtggtggtgctgggcctctgaggcgagccggatggacggacggcatcccctggaccctgccacccttgccaccgtgccacagtgaacacgtgtctgatttagaagtagacattggtctgacaggcatttgttttggtatttttaagtcacggtaaccttggtgttttgtcaagttcattcagatgttaactaaatctttgtgaaaggtgtgaagcatctttctccaatgaaaaccctaaaggacgcaagtgctgatgtgaaaatacgcaaggggctcacggagcctctgggcagacagtacacgtctggaacttgtttaattgtgattgagtctgtcggtgacagtgagctctgaggagcccgctggtggacgctggtgtctgtctcagcccctcctctctgggctgggcacgcaggaggtgaggcagccactgggcggacaggcactctccgattttcctaagtattcttgtccatactgattgccagctagtcatacaatttagtgggttttcctaaacatttatttgctgtcaagtcaatttaattagaatcaggagagcttctgaaccaccccggggaaattagtacgtataaaatattatgacttgatcgatggccattgcaattgttcattaaaagttcatatttcaaatactgtgaaaaatcttgaaatgccaattcattattgtagcatttaattctgagtttgactaaacagtggggtgtcatttaaagaaggtcttcctgctcccttttccactgacgtcttcctgtgctgggattcctgttttaagttcctacttttctgaagtgtcttatttctttctatgggagcgtgggtgttgcccgtacttggagcgacaccactgtggtgggaaaaccccacctgggacggcacagacgggacggtctctttgtttggggactgaccaagacttgtcctcactctcgggagatctgaagaggccctggggtaggcacggctgttgtcttcatactcagttgcagtgtgttatttcttcagccaactgattatttgtttttttattttgagacggagtcttgctctgtcacccaggctagagtgcagtggcgcgatctcagctcactgcaacctccgcctccctggttcaagcgattctcctgcctcagcctcttgagtagctgggattataggcgtgagccgctgtgcccagccttgatactttaaaaacttaggaatgggttttagtgagccttacgtgagccttacaggcagaggatatggacctgccaggctgtgctccttgccatgctgtgggctttgaaccaaaagctgacacgtgggctgtggtctcaggatctttgttgctctcagtttccaggagactgacaaggcgtggcatgggggatgtctggcgctggcagagctgggcaggagaggcctgttgctgccgtctcgactcgtggatggtgagtagctgaggcacggtcaggggggatgtctggcgctggcggagctgggcaggagaggcctgttgctgccatctcgactcgtggatggtgagtagctgaagcacggtcagctgcgtcaccaggctgtccgtggcaggctgcagcccttcgtctgaacccatctccgcggtgtggccctgccgcgggcacgcccagaagagcttgagaacaaggtctgtctacctttttctcgcattggcctttgtaatttcctaattgcctcttttgtctgctgtggaattttaatgccacagattaccctgtgtagctggttttggagggccacgaatccttgtaatgtctgattttcttactccccaaaaccggttttcattcttgagggacattgtcgccccttaaggacacatgcagtggcacctgcttcagttgtagaaccaggtacccctggcagcatcctgggtcacctggagtgacgtggtgctccctggagatgaggctcacgccagcgtgaaaccagggtgggaactggggtggagggccaggggagctctgcagtggccagcagtggggtggggacagagggcacagcatggcagatgcaggggcactgccccagaccagctcttgtgccgtggccacacgcagccctgtctgtgtttggtggggagagtccctgggtgtggctggcagtgccctctgagggcaggaaggaaaggatgtctgtacaggatagagtgggggcccatcctgagagggcctcaccacagagacttgattctgtccaaaataaagacacctgagatgtggtggcctcacgtcttcccagtgtggagctgtggtggcgtctgaagtgaccgctttgcacttggcattttgatgtatggggagagcttttagagcctgcagttcttttttttaatgtctctgcttatttttttccagacttctttaatgtttagacctctttattgcgatctaatttacatgccataaaatgcactcatttaagtgtacggttaagtggtttttatatatttacagagttgcgcaactattgccataatttaatttccgaacattttcattgcctccaaaggaaccctgtgtttaagaactcactctttactctccccagcacccccgccctggcagccatgtctccagtgtctctgtgaatttgtcttttatagacatttcctaacagtggaacctacgacatgtgatctttggcgtccgaattcttcggctgagtttctctgtgtcgtagcctgtggagtgcctccttccttcctgtggcagagccttgtcctgctgtgtaaatgcaccacacgccacgttttgtccatccttttcatcagctgatgtacatctgggttgtttccacctttcactgttaggttaatgctgccatgaacatcgtgtacacgtttttgagtggatgttgggtgtaggcctagtagaaatgctgggtcatacggtaactccacgtttaactttctaagaacctgccaaactttttccaaaatgattgcaccatttcaagttcctgcctgtagtgtgtgagggttctgcttctctgatcctcaccaacacttgcttttatctttttttttttggacgcggtttcactttgttgcccaggctggagtgtggtgatgcaatctctgctcactgtaatctctgcctcccaggaccaggcgatcctctcacctcagcctcctgagtagctgggaccaccggtgcccaccaccatgccacattaatttttttttttagttttgttagagacagggcttcaccacattgcccaggctggtcttgaagtcctcagctgaagcagtccacccgccttggcctcccagagtgtggggaatacaggcgtgagccaccacacttgccccctgcttctttaaaaaaaaaaaaaaaaaaaaaagccgtcctagtgagtgtgaagcgccaccttgttttgcttttcatctgcttttccccagtgactgatgacactgagcattttctgtgtttgcccgtttgtatgtcttctttggagaaatgtcttttcaagttctttactcatttaaaaaaatatttttttaattgttgttgtaagtaagagtttttttatgtattctggatataagtctcttattggatatatgatttgcaaatgttttattgcgttccatggttgccttttcactttctattgattgattgacagagtcttgctccgttgcccaggctagagtgcagtggccccatcacagctcgttgccaccttgatctcctgggctcaagccatattcccaccttagcttcccaagtagttgggactacaggggtgcaccaccatgcctggcaacttttttttctttttttgagacaggatctcattcccatcgcccaggccggagtgcagtggcgtgatctcagctcactgcagcctccacctctcaggctcaggcggtctgcctacctcagtcccctaagtagctggggctacaggtatgtgccaccatgcccagctaatttttgtattttttatagagatggggttttcccatgttgtccgggctggtctcgaactcctgagctcaagcgatccccccgcttcagcctcccaaagtgctaggattataggcgtgagctactgcacctggccttcatgcctggctaattaaaaaagttttttgtagagatgggggtctcactatgtggcccaggctcgtcttgaacttctggcctccagtgatcctcctgcctcagcctcccaaagtgctgggattgtaggctgtacctggtgtgttttcaatttctttgatggtgatatttgacccaggttttaaattttaattaagtccagctcatcagtctttttctttcttgtgtttctggtgtcatagctaagaaatcattgctgaccccagaaccatgaagttgtggtttcatttaacgttttgttccatccgaagtaagtgactcgtaatgtttatttgtgacactagatgtgtgtgagggtgtgtgtgtgaatgtgtagctgggatggaatgaagtccctgcctgtggggagccagctccaggttcactcaaaggagacaagagactctactggcttgtgtgtgtgctctgtcatgtcttatggcaacatgcactgaccccaggcagctggggcgagaggatatgggtgttggcatcataaacgaaaagggtaaagctatggttcagaaactgacacgtgatgtggaatacactggcccatgaccttcgcatggttggttggccccttctgcctggcggtgccctccatgtgagctgaaccctctttgcagcccccattctgttcctggtgggacatggagaagctgtgctgtctctgcacagggcaagggttctttcaggcaggggtgaaagagatcccatcttggggctgactcaggaggtgacagggctgacatttgatgagcatttgcagcatgctttttatgtttttgttttagacctcacaccattcctctgagagccgtcttgtttatataaagctatagttgggagccacgtgtggtggcggtgcctttaatcctagcctcttgggaggccaaggcaggaggatcacttgagcctaggaatttgataccagcctggacatcatagtgagacaccctctctgaacaaacaaacacacacacacaaacactgcagctgtgggagccaggaagtctttctggtgtcacagctcatgctcagcccttcggcctcctccatgtcacacggctgagctgtccctgcacctccttgtctccttggagagttactgtggttctctgtcagtttggtttgaaaagtgaaaacaggctgggcacggcggctcatgcctataatcccagcactttgggaggccaaggcggggggatcacctgaggccaggagttcgagaccagcctggccaacatggtgaaaccccgtctctgctaaaaatacaaggatgtggtggtgcatgtctgtaatcccagctactcgggaggctgaggcagaagaatcgcgtgaacccaggaggcagaggttgcagtgaaccgagatcgcaccactgcactccagcctgggtgacagagcaagatcctgtctcaaaaaaaagaaaaaaaagcgcgaaaacaaatgcttggcaaataaatgtcgtagaaagacacaatatagatgagcatgtttgatgactaaagcttttgtttgtcttagaggaaatgtggagcttcattggtgcatgctaaaggaggaagaagtaaaactagggaagtcaggtgggcaggcagtgatgcgatgtttgcctggaaggcaccctgggtctttctgcccttagtcctctgaatagggggactctgcctgctggactcaggaaaaaagcatcgcattttctttgggttactttttagggaatcctgctgattcctctccacacatacagtgcacacacacacagaatctccatctgttgtgctgtaagcctatttcttggtctctgactctgtgcacaccaccacgcccagctaattttttaaagaaattcgaaagtagcctgcgcaacaaaatgagatcctgtttctacaaaaattgttttaaaaaggtagttgggtgcagtcccagctactcaggaggttgaggtgggagaattgcttgagtccaggaggttgaggctgcagtgagccatgatcgcagtgctgcactcacgcgatcctcctgcctcggcctgtggacagtgggccatgttctttttctctttgcatcatcacctctgtttgaggactactgttaaagggctacttggtctttattttaggtgattcaaattccaggacttttcttgagtggtcctggcgtaggtcctttcaccttttttgtggctcctctttgaacacctctgttgttgtggcaggaggaggtgggcactcctcaccatgagtaagctcctacaatgtttgtgaacccttacggtttcctttgttggatacaagaagcacaggtggggggatgtattggtttaagtttaccttttttttttttttctttttttgagacagagtcttgctctgttgcccaggctggagtgcagtggcgccctcttggctcactgccagctccatctcccaggttcaagtgattctcatgactcagcctcccgagtagctgggagtcaggcgcccgccaccatgcccagccaatttttttatttttagtagagaccagatttctccatgttggccaggctggtctcgaactcctgacctcaagtgatctgcctgccttggcttcccaaagtgctgggattacaggcgtgaggcactgcgcccagccaactgtactattttgataaaatgtatacatgtgctccttattatgcattttgtggttttcatcagtattttgctttttgaaaaatgtcaagtgttctgatctctttggacattttgtatgaaccctatttcccttgctatccttattgattgagaattgtgcatattgatttgggtaataataactagcacttggtgtttttctgagcttggatgtgtagattcatgtctttcatcaaactcgggtagttttcagtcattgtttcttcaggtatttttgctgcccctctcctctccttgtgggactcttgttatgttaatacacatgttggtactcttggtggtaccctatgagtctcttaggttttgcactcatttcagctcttgagtcttcttgttatgttaatacacatgttggtacgcttgatggtgccctatgagtttcttaggttctgccctcatttcagctcttgagtcctcttgttatgttaatacacatgttggtaagcttgatggtgccctatgagtctcttaggttctgtgctcatttcagctgttgagtcctcttgttgtgttaatatacatgttggtaagcttgatggtgccctatgagtctcttaggttctgcactcatttcagctgttgagtcctcagttccagaatttctctttagtttctcttttaataatttctttttgagacagggtcttgctctgtcgcccaggctggagtgcagtggtggtatcacggcttactgcagcctcaacctcccaggcccaagcagctctcccgcctcagcctcctgagtagctgagaccacaggcctgctgcactggaaaaaaaaattgtagaaacaggatctcactttattgtccagactgctttcaaattcttggactcaagtgatcttcctgccttggcctgccttgggattataggagtgagctgctgtgcccagcctgtttttataatttctgtctctttatcaacattccatgttagtttaaatgttgttcttttggtctcctttagttctttgtccacagttttcttgagatctgtgagcatatttttgtctaagactgagcacagtggctcacacttgcttcccagcacttaacctttgctttaaagcctaaaaaggaagaaatctttgcatatgtgtttcccaaataacagatttgagggctgtgttggtgacataggtctgtttatacccactgtgtggctaaagcaggtctctgttaaattagcatctacaaagcttttctcctgccttccctcaaacttaggaagctccctatgcaatcttcaggctggggtccttcactgccccctctcaaggaggcctaccccttcccccagaaggtgcagtctgtcaccccatgtcttataaagtgtaatggtctggtgtcccaaagccacagagaagcccattctaaccttcctgcaactttctgaaggttggagagcatgtttgttttactgctaggaggctcaaggtccctgtgaacctgcatcaggtagtaagccctgcatgtcggaaatacagactgcctaactcttatctaaggtgatgttttgagaaaatttttaaatgtataatacattttataaatttcgaaaaaattttaataaacattaaatttttataagtttatataaatgttataaattttgaaaaatgtacagagttgcattggagcacacgctctcagtgttcatcgaagacgtacaagcagcgtcttacgacgatgttgctgcagctgccttggggtcttgttaaaagcaccattcagtagattaattcccacctgtggactgtgttttctggcttccaaaagaaactgtcatgtttttctctctggatgacgaaaactctgcacgtacttcctatgacaagtgcgattggcgcccactgctcttggcagttgaggtgaggacacagcgtttctgtgacggtgaaggggacagggtttggagggagattcagacattaaacaaggaaacgaagggagcaatttcagagaatggataaagtcgttaagaaaatacaaaagggcggtgagatcctcagtgatggggccaaccagtgacttgaataagacttggggaagacctcctggggcgacatttacgctgagagcttctaccgtgaaggagccgagcaggatggactcctgaccgcagcatctcaaagaggaacgaaggctcgcacgagctgggacagcggaaagagcagaagagtgggcacagaaaagcgcctgggggccagatcctagaggggcttcaggaacacagtgaggggtttggaaattattcaacataaagtcagatactggggaatacacgggggtgcagtggaaaggaagagcgagggagagtgaggccattcgggagccaccacagtgttcggagtgagaccagagctgtgaagaaagagaaaaggaaatacgctgcatgtaggattctgaactcaacgactttgctgttctattcagtgaaagagagtgagatagtaaggtcagtgagtgacatgttggagccttccacatagtaatggtctacaaagttatggattgatgagttcacacaggagggagtgagagatgaggaaggtgaatgggtggaaaagcttgaaccgggttcccaggctcactggcatggggaggtggagaaaaggggaggaagcagccgacatggaaacccgcagaggctccttcagaagggatattttataggagaggagtccgattctgagagggggaaggggtggaggaccagagtttcctcacaggctctggagcactgaggtggatggtaaattccaggagagcagctccagctgaggtctagggacagggcattccctccctggtagagccgttggggctcagtgccgaggctggctcaggctcttgtggggggccctgctgtctgtccagccctggctgtggcctggcctgaccctgctgccccctgcaggcctgtgtacctcagttcccaggtgatcaaggggccctgggagaggttgggtctgagcacgtcctgacatggccccagtgtccagttccccgcctgtttttgttggcttgtttaatcttggtaggcttttaagctttcaggttttcaggaaaatgcaaagcatgagacatctttgactttgtacgtggaccgattgttctttttttgtgttaatggtgtttttttccttgtgtgaacgtgtgtgtttcgtgttgcactccgccctgctctccctccctccctccctgtagaacgtggcattttggctgaacgttaacactggtgggggcagacggcagtgggcccccgttaagactgtttagaaagggcgttgtcggcatcttctcttacatgtgaattcaaggatcctttattttttttcagctttattgatatgtaattcgtctaccatataattcacccatttaaaatatatagttccatggtttttagaatattctattattacttagaaaattgtggcaaaatatgtataacaaatttgctctttttattattaagcatgttaatccagtggcattaattacactctcacttttgtacaaccatcaccattatctggttccaaaacttctcatcaccccagattaagaagtcactcgcccctgatgctccttcccttcaaccctttgtaactctagtctactttctgcttgaaaaaggactttgcctgttttagagatcttgtacaagtggaattggacaatatttggcctttcatgtctggcttattttatttagcatcatgttttcaaggttaatctgtgttgtagcatgtatcagaattttctttcttttaaaggctgaataatatttcattgtatggacataccatatatttatttattttatttttacttttatttttatttttttttgagacagagtcttgctctatcacccaggctggagtgcagtggtgcgatctcggctcactgcaagctccgcctcccaggttcacgccattctcctgcctcagcctcctgagtagctgggactacaggcgcccgccaccatgcccggctaattcgttttgtatttttagtagagatggagttttatcatgttagccaggatggtctcgatctcctgacctcatgatccacccaccttggcctctcaaagtgctgggattacaggtgtgagccaccgcgcccgacccatatatttattttttaaagataggatctcactgtattgtccaggctggagtgcagtggctattcacaggcccaatcatagtacaccacagcttccaactcctgggcttgagcgactctcccacctcagcctcctgagtggctgtgattgcaggtgtgcaccaccgcccctggccatattttcttgatccattcatttgtcagtggacgcttgggttattcccaccttttgggtattgtgaataatgctgctgtggacatggatacaagaacctgtttgacacccctttttttagttcctttgggtatataccctgaagtggaattagtgggtcatgtggtaattctatgttcagctttttgagagcttatcactttttgtatgtaaaaattacgagtgtttagttcttaagtcggatcatgcataaatgcagaaacgtagttaaaaaataagtctcttttttttttctttttgctataaagctctaggaatcgattttgcttttagagatagacacaaagggcttatcctggttgcaatgggtgagctattgcagatgacctttggaggaattgtgtcggagtgtagaattttcacagtgtagctcgccatgcatcaggcacatgtagcctgtgccacaaccattgtgcttgggcggggttctccatgctgccctgttgcaggaggatgctctgcccctgcttctccctatttgtcatttaagatgattcctggtgctttttggtgagcgatcaaatggtgttctcagaatctttgggcccttgacaacggagggctgtattcttgggggtgtgatgtgagagctccttgtctgcagggtgtgaggctttgggtcctgagtgtggaccgtggcatgtgatgtcttgtcacggctccctgcacggctgtttagtttctgaaagctggaagtataatatttttgttctttgccaaaacatactggtgtatataaacagaagtgcccaggtgagcgactcagcactgcgcctgtgtttatggttctgcgtctgaccgtgtgccttttaggctggtgtagtggttgtctgaggtgggtgcctgacagggctgggggacctgctggtgtccttgctgctgctttagggacagcttgaagcagtgtcctcagataccccttggaattgtgacaaactctgtatccctcttacaagttttatagaactctaaccagttgcaaataactatttgccatcctgagtattgtcattttaaaataaaactattgcgtcactcatctgaataaatctgggaaattgaggtagaataatctaccattcttcgttaaaaaatttacagggctgggcgccatgtctcacatctgtactcccagcactttgggaggctgaggtgggaggatcacttgagccccgggaggttgaggctgcagtgagctgtgatcgcgccactgcactccggcctgggccagtgagcgagaccctgtctaaaaaacaatttcataggcaagtttttctctcacagaaattttattcttcctttttcttcttaagcccatatttccatttacttttttcccagagcattttaccctaatgtaatgtatttctgtgcctaagaatctttattgatctatcatttatctgcaacgaaagaaaataacataaacataaacttcaacttttgcattttgtatggccataagatgctagttatttatttattttttccacaggtgttcatgaccttttttttttattatttttttaactatacttttaagttttaaggtgctagttacttagaagtttttttagattgggttttaaaaaattatgagtacagagttgaccaaaacaacataaaatagcatattattgaaatttagctcttaataagatagctgtttagtttgagttatcttttgatgagtcaggctttttttgtttttattttttgaaatgattcttgctctgtcacccaggctggagtgaagtggtatgatcttggctcactgcagccttgacctcctgggctcaagcaatcctcctgcctcagcctctcaagttggtgggactacaggcaaacatcccattgctcagctaatttttgtattttttgtagggatggggtctccctgtgttgcccagactggtcttgaactccttggctcaagcagtcctctcacctcagcctcccaaagtgctgggattatgggtgtgtgccaccatgcctggccgtgagccatgcttttaaccagaataaggcaaggttctgcaacagtacaatttttgctttttatttatgtattttttttgagaaaaggtctcactctgtcacccaggctggagtgcagtagtgtgatcatggctcactacaacctctgcctcccaggctcaggccatcctcccgcctcagcctcccaagtagctgggaccgcaggtatgtgccaccacacctggctgactatttttattagagacggtgtttttccatgttgcccaggctggtctcaaactcctgacctcaagcaatccatccgctttggcctctcaatgtgctgggatgacaggtgtgagccactacgcccggcccctatttttactttcagttttaagtgctaagaagtcttattcattcaagtcttattcaagtagctaggaatggcagaaattttgctttagcaatgctggtgtttcaactttttccaagctcacgcctgacctctgtgctctgtcactgagcagcttcagtagggtggcctcagtcctgtgaagtgatgcgttgacagccacctgcatggggaagcatttcccagtctctggagcagttcccatcgtagtgtccactgcatggtttccagtgtgttgggtgagaggctgcctttcttgaaaagtgagagaaagggctgttgtgagaggggacatggggatggagaaaccctttctcaagcagagccttaggggctgaggctccggaagtctacgctcctaaagcactctgaagcctgaggaccccatggatggccattgagtagccccaggggtgcttcgcacatgccggtacttgaccactgctttaaacccatgtgcacacatgcacgctcacacacatgcacgatgcagaagtgcatacacacgtgtacatgtgcacactgacacatgcacgttgacacgtgtacacccaatcgaatgtgcacaactacccccacagatagcacacacccacacaatcgaatgtgcatacacccacagatacacacacgtgcacacccgtacaatcgaatgcacacatccgcagatatgtacacgtggacacccacacgattgaatgtgcccccccacagatatgcacctttgcacacccacacaattgaatgcacacacacccccccacaggcacacgtgcacacccacacaatctaatgcacacacacccccatagatatgagcacgtggacacccacacgattgaatgtgcatacactcacagatacgcacacatgcacacccaatcgaacgcacacacacctgcagatatgtacacgtggacacgcacgattcaatatgcatacacccacagatacgcacatgtgcacatccacacaatcgaatgcacacccccccgcagatatgcacacgtgcacacccacacagttgaatgtgcatacacccacagacacacatgcacacccgtacaatcgaatgcacacacccgcagatatgcacacgtggacacccacacgattgaatgcgccccccacagatatgcacatgtgcacacccacacaattgaatgcacacacacccccccacaggcacacgtgcacacccacacaatctaatgcacacacacacccatagatatgcgcacgtggacacccacacgattgaatgtgcactcacagatacatgcacacccaatcgaatgcacacacacccgcagatatgtacacgtggacacgcacacgattgaatatgcatacacccacagatacacacacgtgcacatccacacaatcgaatgcaccccccccgcagatatgcacacgtgcacaccggcacaatggaatgtgccccccccgattgcacacgtgcacacccacacaattgaatgcacacacacccgcaggtacgcacacatgcacacccacacaatcgaatgcgcacacacctgcagatatgtacacatgcacacccacagaatcgagtgtgcacacacccatacataatgcgcatgcactcacatgattgaatgtgcacacacccagagatgcacacacacacatctaatcagatgtgcacccccacacagatatgcacatgtgcacacccacaggatcgaatgtgcacgcctaatcagatgtgtacacccctcccacatatgtacacatgcacactaacacaaatgtgtacacacccgcaggtatgtacacatgcacacctacacagtcgagtgtgcatgccccccacggatatgcacacgtgcatacccacacaatcccatatacccacccccacaatcacgtgtacacacccccgcagatatgcacacacgcacacccacaggatcgaatgcgcacacacccacagatagcacacacgcacacccacacaattgaatgcgcaccccccacagatatgcacacgtgcacacccacacaatagaatgtgcacacacccgcagagatgcacaagcgcatacccacacccgcagacgtgcacatgcacacatccacacgatcaaatgtgcacgtgcatctgcagacatgcacaagcagacacctacacgcactcgcagacatgcacacccacatgggcgaatgtgcacaccccccccacacagatagcacacgtgtacacccacacaattgaatgtgcatacacgcacccgttcacaggttaatcgctgccacagctatcagctctttttcattgactgttacggcaaaatattctaaaggataacatagatttatgtttatttgcattttatgtttccttatggttcatatgagtttattggaaaattagcaacatacacatcattttggggaatggaaagtgaggcagagtaagccagaacattcactgtaacattataagcaagtagaataaattgataataccttcaccagtaatgcactttccctagtggaaataaattatttgtataaatagcctcttgatgtttgtgtgttatttagttatacaaatcacatttttcttttttacatatggcactttaatgttagtactgaaaatgttttttctgacattttttcagtaattgtcatttacatcaaatatgcagctagagctaatagaaaaacagttaaaacaatttgttgtaatggtgagatatttataaggaaacatttataaaagatcttctgtaagacagcttagacttgaaaatacatatcagtcttagagtcattcaggtgtttttacaaccaaaagtagaagcaccttttaatattcatgcttaatatttataaaaactgaattggagggttttttgtttgtttgtttgtttgtttttttgagaagcagcagctgcatttgtaaaaatgtgaaagtgccagttcagaggtgttgtagcttgccaccttggaaggcgtgtgtgtggccgtagctctgtgaacacacgtgtgaacccggcgttaggacacccgggccctccttcgtagtgtgaacactctggccgtgtcctgcagcttcgccttcttagctccttgctgggattttccagcatcccttagacttgtcctcttttgtcctttgggtctgaggtcacactgggcctcttggctctccatggagctcagtgtgggtgtgtcttgccggcaggcaggttccggggccgcagcatccccatcgcccacccggatgttcctggggctgtaggccgccagctggcacagggccacggctgccgtctgcttctgctcctcgctgctgtccaccgcgcatgcgtctggagcctcctcgccggggcctgtgggtggggccccgtcaccgtcgaggctgcctggcttggtctcagggtggctgggcccatcctcagaaccttctgtcccagtcttctgtggaacagcagcagcaggttctgcagctcgtggtcgaccggggaaggcaggcctcggagcctgggtgttacaggggtccttcaccgagagattgagtggaaggtcctgcagctctgagaagctggcggtttccgcctgggggctgccttggtacgtgggttcgtgggtggctgccaggtttatctctgatttcttggagaggttgagggggcccatcccggagctgtcgtccggactggaaggcgcggcctccgagacgagagaggcgcttccggtcggagcaggagggtctccgttcacaacattgaggctagaagaagccaagaaaaagcttagtaggagcttgcttagaaaagcaactgcgtgaagcagtgtgagcaagtataagcctggctcatggaacccaaccagaaacattcccttggaggttttgaaaatgacattttcttaccttactggagactctgctgtggtctcagcagcctgggcaggtaggcattctgtgcttttcttaacaggcctgaaggctgtgaggctttgctctggcgggtagagtcttcccagtgcgctggaggctgccttgttggagaggtcgtacaggccttcgcaggtctggctcgtctgcatgaagtcggtggggctcggcctccctggggagcccgtggctgcactccctgcgcgggggctcattttggacccttccgtgtctctctgcccagccttggaggagtctttagcctcaggaattggactttcgaactcgacgtgttttctgttggggtccgaagggtttaacctggaaggactcgaggctggatagaccagggtggcttcttcaagcaggtgagagctctgatctcgggtgaggccagtgacaggtgggagtctgagaccataggaggaaaatgcagactctggcctgtaaaatccgtaaggaatcggcaggttagagggatattgctggaaaaacctgtagtgatcgtatgtggctggagatggagccaggtgcttagggatcggccccgggtgaggcaggaagtgtctcgggtcttgggttccgtagactgacagcaggggtgcgtcacactcaggcgagctcccagccagcaggtaaggcgagtagatggtggccagcccgtgctctgtgtaaaagtgaggcgggtactctgggattgtggggtgcatgtaaggggaaatggccccaagcccctttgtagatgagattttatgtggaaactctggtggaaggaaaggtgagccggctttccaggggtagccaggagtgtggaaggccgacttggtgtggaaagacacggccttggcagtggggttgtgtaaagccagtgtctcgggcgcctcggcgttgtctggccccttgagtctgtgctcgccgactggaacaaatgcagaaggccgagctgcgccttccagagcaggctgggcaccgagggcggcttccggagctgggctcttgcagggtgatgccctgtggagggctggcttctgtcccaggcacctgtgggttccccgggcttgcagctccaggttttccttgatgtcttccctggcagagctgtgctgaagcttcgagtcgaaggcagagagtccatttgcgacagacttggaagaggctggcttcgccgtggcatcgggctggttggtttgcttggggtctagtgagttagatttagggcacttgggaactcgatcctgctctgatactaaagtaatcgagtttttacaaagaccatacttcatgtgattaaaaagatgtgacttctcattgcaagtaaagggacattggaaacatttatacttgaagggctttcctggaggcctggggatgtaatgtggcttttttggcttccgctctttgaggagactcattttcctccttatgccttggactctggctgtccaggtggcgtgatcactgtcgacgccgcgtgcacttcgtggtttctaaagaggcacctcccgctttgctttctttcccgatcacttctatcagaagccagctctgcgtgctgagggtctggcgagagcctccgtcatctggcggctgggagctgtaataaagagcagtcttggtgtcaggacagcgagtgaggggtcggcgagaagccggcctcggctcgccacagtgccacaggatccctgaagcagaacccctgaagggctgaaactgcctgctcctgaggggagcagctgccggtcacagaagcagccctgccctacccttggtaacctggctgctgactccccaccgtgttttctgttttctgagtctgatctgaaagagtcacctcggggcctagaggtggagtgtggtgtgtggtgcgttgagtgtctgttctgagaatgcctgtaagcctttgagttttgggaactttcatcctgtgacctggacctttcctcgaaagcgccctgccgggggctgaggacaccgagccccctcccagggtctggacagagtcctgtcccagggctgcccgactctgcttgggggttacacgcttgaagcagtgggtgtgtgatcggccacactctcacgtgaaatacgaaggggtttgtggctgtttccccttaacatgtacccacagtcacagagtgcccctcacttttacacagagcgtgggctggccaccgtctacttgctcctacctgctggctgggagctctcccaagtgctgtgcgcccctgccgtcggcctgtagaacccaagaccatggatgctgctgcctcccctggggccgatccctaagcactcgtggcagtttctgcccactttagccacgtcgttggtgtattctagtgtgcttgtttaaaaatgaagaacattcgaacacaagactctaccctactgcttctaaagtcagctttatcattaagtagcatttatgttgtctcagatatgaatacaaatgctatatttatgttgacttaaatggttgaaatactgttggtgaatttgtacatcctgtgagtgacagcagcattgtgagacatgctttcacggtcacccggttcctgctggccaggaggcatggccagcagcgcctgcccgtccagatgcaccaccaaatggaagaaccaaagctttgccacactcctgcccgagaggagaccagagtgagtagtatccgctttagagatggttgggtcatgggaggaagctgtcctggcccttaacctttagggagtgggttcagccctctggccacacccactcaggtcctgggacccaccagaggctgtgtgtgtgatgtcagagctggcctgctcttttggattcttccagagggtctctgtgtcccccttaccagcctcaggtttccttcagaggctgtgccgcacgcccaaggctgagaacaaaggctgtttttctttttttgagacagagtttctcccttgttgcccagtctggagtgccatggcgcaatctcagctcactgcaacctccgcctcctgggttcaagcgattctcctgcctcagcctcccgagtagctggaattacaggcgcccaccaccatgcccagctaattttttttgtatttttagtagagacggggttttgccatgtgggccaggctggtctcgagctcctgacctcaggtgatccacctgccttagcctcccaaagtgctgggattagaggcgtgagccaccgcacccgtcccagaacaaaggctttgagagtctgggactgtccacctggcagctgggcctggagcgactcaagcagcaactgtgcctgggagacagggtgagtgggagatggggtggaggtgcaatggatcaaggctaagcactttaattcgtattaaaaatgtaaaaaagaaaaggtctttagggtctaaatattttcaaacagcttaaaaataaagttaaatgacccaaatgcctatcagtgatagactgaataaagaaaatgcggcacatatacaccatggaatactgtgcagccataaaaaggaacgcgatcatgtccttcgcagggagaaatggatggagctggaagccagcatcctcagcaaactaacgcaggaagagaaaaccaaacgtgcatggtctcacccataagtgggagctgaacagtgaaaacacatggacacagggaggggaacatcacacaccagggcctgtttaggggtgggggtcggggggagggagagcattaagacaaatagctaatgcatgcagggcttaaaacctagatgatcggttgatgggtacagtaaaccaccatggcacacatttacctgtgtaacctacacgttctgcacttgtgtcctggaacttaaagtataataaaaaaaaaatacattaaagtaaagttaaatggagggctgggggccgtggctcatgcctgtaatcccagcactttgggaggccgaggtgggaggatcccttgagcccaggagattgaggctgcagggagctgtcatcccaccaccgcactgcagcctggtgggcaacagaatgagaccctgcctcaaaaaaaagctaaatggaaatgacttaagaaaactgtttcaactgcagtattttttttaaggaatgggcagatgtgcccattcttgagtctgtgaggttttatgtgtagacatcagggtggctaaaagtcaagtgaaaagccgccccttgaaaatagagcaacgtgtgtgggagcctaggaggcagctgtccctgaagcaaggcgccacccctcctccctgcacccgtgtccttcctcccacacgccaggggccaggggtggtggctgggctttcatatggctgccccgaactctggggaagtgctctgattttgttctcagcaaactggtttctctactgatttattcatatttctttctttctttcttttttgagacggagttttggtcttgttgcccaggctggagggcagtggtgcgatctcggttcactgcaacctctgcctcctgggttcaagagattctcctgcctcagcctccctagtagctgggattacaggtgcctaccaccacgcccagctaatttttttgtaattttagtagagatggggtttcactatgttggcccggctggtcttgaactcctgacctcaggcgatctgcccgcctcagcctcccaaagtgctgggattacaggcatgagccaccgtgcctggctcatttatttataattcttaaaaacacaaccacccttccccctacaaactgcctctattaacatactttaagttctttaagacatttatttactaagaagtggtttgggtagaaaaggggctctgctgacctgccaccttcgctgtgatgagtttctgtgtagcagggacagcgaggcacggtttggatgaggacaagatgtttgttaccctacaaccagggagggtgtcgggtgacaccctgggctcagaccccgcgctcagcacccgtctcccaccgtgggctgccacagaagctacaaggcaccgggtcaaggccaagcaaatgaaacacgtaatgatagctctgtctttctaatttccccctattagaagaaagaacgtgaaataattctttatgggctcagtccctaccgtgtggggcagacctgctctgggtgatgaaagcagtttccctgcctcccttcaggaagtagagaagccgggtgcctggttccagccaaacgctgggccagccagctcagtcagtggggcctgtgccggcatgcctcgccgcgctccctggttctgaaggcgtgagaacctctgcaagtcaggttcccatgattgtataggatgtgttacggcagggatctgaaagctgatgatttcatcactagctggaagcatcaggatcgaaacgatgacagttgcaaaatgttcatcaagtgagagctgcgtcctcgcgagaccgaaacgccgcctctagcacctgaaacacaagccctcagaggagcagatgattccctcaggatttaagaaaattgaggacttcagttttcgaagccgcattatttcacattgctgatacctctagcgcctgaaacacaagcgctcagaggagcaaatgattccctcaggatttaagaaaatgaggacttcagttttcgaagcagcattatttcacattgctgatacttttaggcaaaaaaaaaaacaaaacaaaacaaaaccaaaaaacaaaaaaacaaaaaaacccacaaaacccgtgttggttagattttctcaaaagctttacaacaggcaggttacgtgtaagctctgctgttgcccaaaatagtaattagggaaataattgcttttaaatgaatatgtctgttttctagtcagatttgcccttttgttctttgatcagttagttcacgtaagcgggtgtggcagggaggaagcccctggtggtgagagtgtttggagctcaattgctcgaagggaattggtgtcgatatggagtctcgggcagtggttttagtaaccttggataaaccgacctctcaggcttgcacaatttgctaattaaaacagggagcacagctgcttcagttgtaagccgggcgtaggtcacctgatctgtaaaactacaatagtgtcagagaagtaagtgggataacattgttgctttggtaagctttcaaatgatgatgatgtcagcctgtgagttctgtgtcctgcttaagtgaggtttataaggatgaagaaaccaaacccgacggccagtacctcaggctgtcacagctgtctgtgggcacagcgtttgaaatagtctctgtgtggtcagtttctaccagcccgactttgtactctggcagctgctggtgttaaatattcccaaaagagtatgttgttgcccaaacagtgtaacccagaaatctagctgtttacagtaatttggatttgtatttagaggtgcagtttttctctagaggggataaagaagtgcggagcgtctttctctcctgggggaggtgtgtttccattttagttaataacatgcccggagagctgtctgtctgtctgttaataaagcagagtctcattcattatctgctttcatttgagaactgcagtgctagcgtgttttacagtgaagacctcggtgtgatcctgaaggagggtttcatcctcctctcatttcccactggatcggcaggaagcgttagcagggtggacatgccacagagcttccagatctggatcaaaggtggctgttgctgaaatacttatgcagagtcttccctgactgctgctggctaatgtgtgccctcttctccaacacacctcctccgagcctggcctggcacaaagccttctttctccaagttatttcagatcaagcagccaatgtagacagtgtctacactaaagggcgtaagaacagtggggtgcagtggcttcaaacatgctcaggatccagctgagctttcaccaggcttttcttgccatatttacagatgccactctgtgcctttctaaatattttaaatgttgtgtgctcagccgatgcacttggcttctggaaagtgcgctgagctgagagctcgcttctcttcctgctcaacgtgcactgggccgggtgttggggcgtagctgcccacacagacagtgctttgaagagtgagtggtttcggttggccatggggttgtgtctaaattgccaatatactgtctttccaaaggttcctaagtgtggacagttaatgcagcagacagttgttagggtaatagtgagaagttgggatgcttaacaagcttctaaggagtttgaactttgaaaaatagacaagagaaagagttcttaaaaaaaaaaactttgataggacacagcggaagtaattacagtttaactttatgggacgtttctgtgacaggctgggtaactatgcttgtcatgcgtcctaacctgtgccctgagattgtgctgtaatgttccttttggtggtgtccagctgtctggcaaggagcctgctcggctggagcattgtgaagggcatgctgtaattacaatattgtgatgtggcgttgttgcataactcaaggacacaccattgtcgcctacccactgtgatgtcgcaagaacgagatttgtgagttttactccaattgagcttttccagtgattgactgccactccctcccagcctttcggttctttaaaatgaaagataaacctcaggacaaccaagacctggggaaaagacagtctttgggaatgtaatttggaagaatggatccagaaaaacaaccaggggctcttaactctagtttcggcaggagatcccgagttacagacctgagctcgtaaacaaacgctcaccactttacagtcgccgcctcatcctgaaactccggtcagaaatgctggaaggcctttgctaatgcgcagtgaaaattaggggcacagatgtggacggactgtgcttggtcagtaattgttctcctccaaatcaagtttatgagaaatttcatataaggaaaaaaacccttttgtatctgtgtctatatgtacagaagaccttaacaaccaaacagaaacttaacccctttggtttggttttgttttcgaaagcttatgcccaattttaaacttcatgtaagcttatgtacttattttaaactttaaaactattaaaagttaaactagatagtaaattcggcactgtctaatgtgcatacaccacaaacatataaccctaaattcagctgtgtctaatgtgtatacaccacacatatatataaccctaaattcagcctgatgtacttataccacacatatataaccctaaattcagcctaatgtacatataccacacacacatatatataaccctaaattcagcctaatgtacatacaccacacatatatataaccctaaattcagccctaatgtacatacaccacacatatataaccctaaattcagcctaatgtacatacaccacacatatatataaccctaaattcagccctaatgtacatacaccacacatataaccctaaattcaccctaatgtacatacaccacacatatatatatgacccttacctcttgttagcatttattgtagtttgtttttgaggttaggagcagttaagcaataatatgaatttgtgttggtttaacttttatgaattttagggcagaacaaggagttaatttccagataagcttgttcatgttcttagaataaagtgtcagcctcattagaagttttgtaatcgtggtctgcatcccagccatgcacctgctgggtcctgagtaatcctcggagcccagagcaaggcagagcagacacggagcaaacgctgcgttcagctgggtattttagatacgtctgagaagagttttaaaataaaacttgaatttgaaaagaaatagtgagtacttaccagaggtgggcagtgctgggatgtggccggtcttggtgccggtggctggcggtgctcaggaagcagtacctgttctcacgcttgctgggtgaaactggagcctgctgttccagtgggagggatttaagtgtaggagttgagccctcggggcgtagagatgcacctgatattcctcctgcccgcagctacgattcatgtgtttgcacccaccgagctgctgcgggcagcctccccagcactggacccagcaagcaagttatctcgccgactcccagcgctgtctccagactcaactgtctgtgagtgcggcgtcggtgctgcctggacggccatatgtcagagggctttcgatgtgtccgcagttagaatagagattactatattcatcagaatcacacccgatgaatatttggcgtcatgataaagacatgtgagactttcctttagaacttgagcatgtgtacgcaggaggcaaacacttggattgattctcaagcgcgcataccctgggaggcacagtattcatggcgtccttgccatgaggtccagtgaggcctttgaggatctgtggaccttccaccctctaccctgctcctgagagtctctgtccctggtcctcctcaggagctgagccggcagggagggagcttatcccagagcctggctgcagggacctgccggagcttgcccgacaccaggcaccgcaagagctgcggagcagggtgtgtgggtgcgggggagggggccagctgtgcactcccgcaaaccaccctccccccactttaaattgcagaggcacttaacttgggggccagtttttacctccacacccccccaccaaaactgcttgcttgcttaatcggaggccgcaccccagttgtagcgaaggctggcatgtggtgtcggtttgaggactgggaaaggaggtgggatgagctggtgtcaggcccttggatgagcctgaggctgcagggcagaggctgcagggctgtggcatagggacgagctggccaggacagacaaactggtttttttttttttttttttttttttttttgagacagagtttcactgttgctgcccaggctggagtgcaatggcatgatcttggctcactgcgtttctcctgcctcagcctcccgagtagctgggactacaggcgcctgccaccacgcccggctaattttttgtatttttagtagagatggggtttcaccgtgttagccaggatggtcttgatctcctgaccttgtgatccacccacgtcggcctcccaaagtgcttggattacaggtgtgagccactgcacccggtctgtttttttgtttttgttatttttttccttaagacttaagattttacatggctttgcgtttacttttatatttaattccttttttttttcttttgagacagggtcttgccctgtcacccaagctggagtgcagtggtgcgatcacggttcactgtagcctcaacctcctggactcgagtgatcctcccgcctcagtctccccagtagctgggactacaggcacggtcactatgcctggagaattttttgtagagacagggttttgccatgtttcctaggatggtttaataccttaaaattttttttggtggcttttgtccattgagacatccatatactttatgaagtcaaaaagagttatgtaagtcttatgacaaaaaacagcagttccctgtccctcttacctattcctggatagcaaactatcccaaacttagtggcttaaaacaagcaccgttttattacgtcttaggatatattgtgtcaggagtttgtggagggcctggccgagtgctgcttctgtttcatggacactgactgaggtggctccgtgggagaaagctggcaggtgactggtctggagggtccaggacagctttactcacctgccttctgtcctggaggggcagctggaatcctgagatcagctggaacctcatcctcacttagtagcacttcagaggcctccctagcagggtggtcagctgtatgatggctcaggacttcaagagagcaaggcggaaggttccagtcctccagaaggctgggccgcagattgtcagggtgtcccttctgtcacctttctctgctgaggcagcctcgtgctgcccagatgcaaggcgggagccgagggctccacctctcagcggcaggagtgccaggtgtctgcgctacgactccctctgcccggaagccccaccttggcctttcctaagctgagtgttctgacccttgccatggagggtccagtgaggcctttgagaatctgtgtaccttccaccctctaccctgctcctgagagtctctgtccctggtcctccttgggagctgagacggcagggagggagcttatcccagcgcctggctgggtgtttacctcctcgattccagccttactgatctgttggtggttctgtgccctctctccccctctctcccttctccactcctggtcgaggtgttgtttggtggcttcccttcatggaagatgggaatttgcctctctttgccccttctgcccccatgtctgccttccccgtcacccagggggttttgcctgcctctctcttgcactggaaggcctgctgctcggatcccatgtcgtctttctcttgagttaatcatttagtttgacatgaggcacacaccttttataggctcttgagaaagtgcaagagagatttttttggaggtcttgaattattgaaaatgtttttatctactcttcaacctcactgatagtttggctgagtctagaatttcaggccagaaatcatttaccttcagatttttgcaagtgttcttcattttctttctttcttttttttttttttttttgagatggaatctcgctctgtcacccaggctggagtgcagtggcgcgatctcggctcactgcaaactccacctcccatgttcacgccattctcttgcctcagcctcccaagtagctgggactacaggcgccctccaccacgtccggctgattttttgtatttttagtagagacggggtttcaccgtgttagccaggatggtctcgatctcctgacctcgtgatccgcccgcctcggcctcccaaagtgctaggattacaggtgtgagccaccacacccggccgcaagtgttctctattttctctagcttctagtactgtggttgagaaccttgatgccattctgattcctgattctttctctcttaacattttagtgtgaaaattttcaaaatacagacaagttgtaaggatgctccagtgaactctcatatgcccaacggtggggttctccagttaacacagctgtctgtgttcccttcccttcccctccctgtccagcttacttacccttcccttcccctcccctcccctccccgtccagcttacatacccttcccttcccctcgccgtccagcttacttatcattcccttcccctccccgtccagcttatatacccttcctttcccctccccatccagcttacatacccttcccttcccctccccgtccagcttacttacccttcccttcccctcaccatccagcttacttacccttcccttcccctcaccatccagcttacttacccttcccttcccctccccgtccagcttacttacccttcccttcccctccccgtccagcttacttacccttcccttcccctccccatccagcttaatcgtcttgctgcatttcaggtcagttgcagacatcagtatgctttgccccaaacacttttcaggcatattcttattagtttatgattcttctttcaaaggtaaggtttacattcagtgaagggcacaggtcttaagaggatcatttaacgagttttgacaaatgtgttctcccattatggccccagagagttccgtcacagcagtgccacccttccccacccagaccgtggcaactgcaggctgatacttttccaccatggattagttttatgtgttgtagaattttatgtcagtagtgattcctgatttttatggacagctgtttctcacctgcaggttctttcctttatcctcagtagtcttagttttcttaactttatatttcaacacttctgttaagtacttggtttctgattttggtttccatgagctctgttttgttctgagtgttccttttgtagcatctcattctcatgcagtactttcagtagcttttcttatctaaggattttagtgatagctttcttttagtggggagtggaggagtgggggtggatgttctccgtgtgtgtgtgtgtgtgtgtgtgtgtgtgtttaaagacctggggtcttgctgtgttacccaggctggacttgaactccgggtctcaagtgcttctcctgcctcagcctcccgggtagctgggactgcaggagcgccatgccatgcctggtgccctccctgcatcgtcagtgtggctgcctgccttccagggcctctgctgagcacctcggagagtcagccctgtctcctgccccagtgctccttgggttaggcctaccctgcccctccccacagagttctctggtgccacagatctggagctttttagggacctgtcctgtggatcagggggagtctgagttgcctccctccaggggagggctgggcttcttggtctgaggcatttcctgctgtccctgcacttccaggctcctccgtggtcctggtgctgccttccctgcccttcctcttctaccctgtagcttatttcttgaaaaaagaaaatggtccgtttctgctgtttttagtgggattttacccgctattttttacatgttcaaccccctgtgttactcagaattcttgcgattaggtttttgaccaaatcttaggaaccgtcatgggggtggcagctgatgtttcttgcgtgttgatggtgtggggcaccgtgccaggtgcatcacctgcactggtccatttactcagaagcaccacgcacctggcctgtggagtccccccacccacaggtcgggaacatggccgaggtacccagcccagagggcgatgagcagagttacaccagaggtggggggtgcttccctgggtggggaaggaggggtacctggggtggtggctgctcttgggggtaagcaccggtgccagtgtgtgttggggggtgccagggacccaggcaggtgctggcgccgcggcctctgtgtcagggcctctttccctaggggcacacaggctggaagtgcagtcctggttgagctttcctagtttccaggtcgggggtgaggcacaggacatggccggctcggccccttcctctccatcctgtccagctcagccccttcctgtccatcttgtgcggcccagccccttcctctccgtccatcctgtccggcctggccccttcctctctgtcctgtctggcctggccccttcctctctgtccatcctgtctggctcggccccttcctctccgtcctgtccagcttggccccttcctctccatcttgtccggcccggccccttcctctccatctcgtctggcccggccccttcctctccgtctgtcctgtccggcccggccccttcctctccgtcctgtccagctcagccccttcctgtccatcttgtgtggcccagccccttcctctccgtctgtcctgtctggcctggccccttgctctccctccgtcctgtccggctcagccctttcctctccgtcctgcccagcccaccccggtcccttccgcagcagcatcctctccagtgcactgtgtgctgggactcaagtcttggctcttccatcttcaccctttgtgacttggggcagcaattgctgacctccctgggcctcggtcttcctgtccgtgaaagggacttgtgagcatctctcacagaacacctgtgatgaaggaagggcgtcacatcttggatcttcttaaaatacaagattgtttctgttttaatcctttgtgttccttgtgaggtgctgcatccagaggaaaggagaaaggaaatgaaaactctgcggaaaatccacaggcctggcatcagcctcccagtctgattttgacgcggctgtaggggagacacagcaacattctatcccccgagggcacagcttcaggaacggctccgggccggagggcacctctcgcctggctgtgttgtgtctcagggctctgcgcttctaaagggactcaggccagtgggcagaactgtgggatgggactgggaggcttagggggtgagggtgtaagccctgtgcctccctccacgtgctgcgtccggcatgccacgtcccctcgtccagccctctgctgccccctccacgcgctgcgtcctctgtgctgtgtcctcttgtccagccctctgctgccccctccacgtgctgcgtccagcgtgccgtgtcctctcgtccagccctctgctgccccctccatgcgctgtgtcccatgtgccgtgtcctctcgtccagccctctgctgcccgctgctctctttgggacttccattgtttccccttccccttcctttcctggttttcttccctagtgaggtgcccttcctgctgctgcagggccctgctgtggcctctgccttccgtccctggcggtagtgagactggctgagacccaggggaagcttggagactgtcctagatttcggagatggtggtacacaggcttgctggcttgggttagggctctaggccctgccttcgggttgtctggaagccgccagccaggcctggacacctctctgcccccgtcacctcggagcagcagcccaggagcgggtcacagcccttcccctgtgttacatggtcacctgcctgagaacccctgcaggcccctgtgttttgggaagttgatttaactgaacagagcgcagctgagaaggggcgcctccctccccacccaccctcattgcctgggaccgcgtgtccaggagccgggcctcgggtgtctggtctctgggccacacaggctaacatggccaagcccagctgcacccccggggtcctcacccgccatgtgcctgtggtcgtggccaaggtctgggcccaacctgctctgggcgctgtgggcaccgctcagccattttctacaggtggccgaggagacatttggtttctcattaaaaagaaacaggccgggcgtggtggctcacgcctgtaatcccagcactttgggaggccaaggtgggcggatcatgaggtcaggagatcgagaccatcttgtctaacacagtgaaaccccgtctctactaaaaatacacaaaaaattagctgggcgtggtggtgggtgcctgtaatcccaactactcgggaggctgaggcaggagaatggtgtgaacctgggaggcggagcttgcagtgagccgagatcatgccactgtattccagcctgggcaacagagcgagactccatgtcaaagaaaaaaaaaaaaaaaaaaaaaaagaaacaaccctgagaacatcagtggggttttactgactgtgtcagacaactcagcgatgcagagaaatgaaagtggagttgatttggctcttgtggtgagatacagccaaggtgtatgagagaatttggggaaagctttctttctggacatttgttgacgttgatgagtagtggagggctttatttgtaagttgaagtctgagatttgtcatgccaatacctaaattttaatttgtttgtacaaataacgccacaatttaattcttttttctttttgagacagagtcttgctctgtcacccaggctggagtgcagtagtgcgatctccgcctcccgagttcaagtcattctcctgcctcagcctcccgaatagctgggatcacagttgcgtggtaccacgcctggctagtattttgtatttttagtagagatggggtttcatcatgttagccaggatggtcttgatctcctgacctcgtgatccaccctcctcggcctcccaaagtgctgggattactgggattacaggcgtgagccaccgggccgggcccacgatttgaatttttatggaactggggctaacttaattttttcagacgagtgggagtagagcaaacggcccctgtctgttgcccctttttcctaccaaggcccctccaggctgtctcttgcctggtgagtgtgaggagatgggtgggcgcggccctgtgggatggtgctctgtggcagggctggcagtttctgggtgtgtggcctgtgggtagcctttgtactgggcgcacagtccccggctcctcccttccaacaccttcgccctgagcggcctcggaaatggggcttctggcggctctgcaggcaccgtcagagtcagagggagggcgagcggcttttggtttctgtttaaacagcgtcctgtcgctccctcctctcctgtgcggattggcgctgcggcttctgtgttgagagggaaacttgaaaccctgagctatgtatggcttgttttgtctttgattgggaaacccaattcaggtttgtgaacttgggccaagtttaagaattcccacagttttcttcagctcctctcctccctgaaccccgacagcgaggtgtcttacgcttcggcattctcactcgcctgactcagacttgttagttttccagagcaactcatgtggccgccgtctagggagtttattcagagggtgcctctacatgcacagcagccaggtacagaagtcatgagttaaatcgcacaaggacaagtaaaatgaaaaaaattagcactcagatcttcttttttttcatgctacaaaataacagtgaaaaacctaacgatgaaaatagatgcgaacagacaaaaggtcaatgggcttgatcccttctcatcctctctcctgtgtctcctggaggcttctgcacctctgtgtcttcccccgctctgctgcgtcttctccacctcgatgtccccctctgcctgctgcgtcttctccacctcgatgtccccctctgcctgctgcgtcttctccacctcgatgtccccctctgcctgctgcgtcttctccacctcgatgtccccctctgtctgctgcgtcttctccacctcgatgtccccctctgcctgctgcgtcttctccacctcgatgtccccctctgcctgctgcgtcttctccacctcgatgtccccctctgcctgctgcgtcttctcacctcgatgtccccctctgcctgctgcgtcttctccacctcgatgttcccctctgcctgctgcgtcttctccatctcgatgtccccctctgcctgctgcgtcttctcacctcgatgtccccctctgcctgctgcgtcttctccacctcaatgtcccccgctctgctgcgtcttctccacctcgatgtccccctctgcctgctgcgtcttctccacctcgatgtccccctctgtctgctgcgtcggggctgcctaccgggcttggtcttcagggccactgtttctcctcagctaagtcctgagagtcacatttccatccattgcagtgaaatcttttccttcaggtatttccagaccttggttttggccccttttcatatcttccttgtttcctcgctgtggttttcatttcccctttcgtctccttaacctgttttttgatggtgtctttttaggttatctcaagttcatttcaagctctgaaagtaggaagtaaagtaagaaccgcgtggcactagcaatcactaggcattgttccaagcacacggataaactgagaatcctcgtggtcgccccgggggtgggactgccattgtccagagagacctgcttttgcctgtggtgccacacgggtccctctcacaggatgcgaccatggtggctttgcgtcatgtcacctcagccaggcaggaccttctgctggaacccccttccctggtagtcctcggagagggctgtgcacaatctggaggcagaagcgaagcagtagcccccgtgcgcggcagctcttgaggctgtgctgctgttggctgtgctgttgttggctgtgctgttgttggctgttttgctgttggctgtgctgttgttgcctgtgctgctgttggctgtgctgctgttggctgtgctgctgttggctgtgctgctgttggctgtgctgttgttggctgtgctgttgttggctgtgctgttgttggctgtgctgctgttggctgtgctgtgctgctgttggctgtgctgctgttggctgtgctgctgttggctgtgttgttgttggctgtgctgttgttggctgtgctgttgttgcctgtgctgctgttggctgtgctgctgttggctgtgctgttgttggctgtgctgctgttggctgtgctgctgttggctgtgctgttgttggctgtgttgttgttggctgtgctgctgttggctgtgctgttgttggctgtgctcttctgctgttggctgtgctgttgttggctgtgctgttgttggctgtcctgttgttggctgtcctgttgttggctgtgctgttgttggctgtgctgttgttggctgtgctgttggctgtgctgttgttggctgtgctgttttgctgttggctgtgctgttgttggctgtgctgttgttggctgtgctgttttgctgttggctgtgctgttgttggctgtgctgttgttagctgtgctgttgttggctgtgctgttgttggctgtgctgctgttggctgtcctgttgttggctgtgctgttgttggctgtgctgttttgctgttggctgtgctgttgttggctgtgctgttgttggttgtgtgtgctgaccccggaccccctacagtatggctgtgcatggactggtgatttggcccccatggcctcatcagccctgatccatccctgcattgaattcgtatggggcttgtggtgagtctggactgactcagctttctaaaagctgaaaagcaaaagttaataggtctgcagagataaatggacagacccggtatcctcctgagagctcaaaacacctcccaattattgataactaaatatgtagtggagatatagatatgtataaaacgcacattacatactgtgtgtgcacatacaatatttcaacagcagaggcgactggcatgattccataattgatacagaaccgtgtagctagccgttggagaatacacatttgtaggcacctgaggaacattcacagatattacacagccaggccataaaacaagtctcgagacatttcagagactcactggcggacagatggtattccatgctcacaaagtaatgaaattaaaaactggatacagaataataaaggaaaggtgataatttttagttagaagatatacaaatgtgtaaatcacatgagtcaagtctcaggaggttttaaaataaaaagttaaaaaagtttaaaaataaaaataaacagtcacaaaattattctatctaaaattttgggatgcagctaaggaaacttaaacctttaaacaggtgtgacgaaattgtggcctgcaggcccagtggggcctcagcctgtttctgtacagctttggagccaagaagggttttcacattttaaaaatgttatcaatgagaataaacacaaccaagcagagtctgcgatgtggactgcatgtggcccacagggcccgaggttctctctggccctggcaggaatcacttggtgactcggcctcagacacgtgtacagaaaaggagaaaggttcactctgcacagggcgggtgggaagagggcagtgagcagaaccctagaaatgaaggaggtggaagacaaagatgagagaggacacacagagccaaacgcagctcttcgagagggctgatgggaccaataaacgcgtggccgacgggcagaaagcaggagccttacacacggaagggagccctcgtgcagccaccgtggagatggaaaatggcatgttaagaatatcttttgccaggaaatttggtagcttaggcaaaatagacgttccgagagaaatgtaatttatcaaagttgacccaggtgggaatagaaaagtgactcctcactgcttcagcgcatctgcttgtaagcgggaacgattactgttgaccccataggatttttaatgattttgttgagacgcaattcacatgccattcagttctgtcattaagtgtacagttcagtggcttgtaacgcatttgcagagttttgcagccatcgccacagtcagttgtagaacattttaccccacgctccttcgctgtcatccccaacccccccgacagatggataaaccccccctcctagacaccacagatgggttctctgtgtctacccattctggacatttcctgtgaatggaaccgtgccccctgtggtcctctgtggtggctccttgccccgagcgtggcgttggcgtggtccgtgggcgatgcagcccccagcagtgctccttttcttttccttgttgaagcctgttccatcgtgtggcatcttagtcagctcaggctgtggaaacaagtcaccacagatgggggctcaagcagcacaaatgtatccctcacagttctggaggctgggtgtccaaggtcgaggtgccagcaggctcggcagcaggctcggtttcttccgggttttcctgggcctgcaggcgctgccttcctgctgcgtgctcgccgttcggtctgtgtcttggtgtccttgtttcctcttcttaggcggacactggtcatagcagatccgggccccacttgcgtggcctcattttaccttacgcatctctaagggccacatctccagatacaggcactcgggggcactggggttaagacttcagtatgtggatttcagggagacagaattcagcccacgacgtacatggaggccgcattttatttatccatctgtcagttggtagacgtttgggttgtttcccactgtaggctgctgtgaataaagcattcgtgtgtgagtttttgtgtggatgtggtttttgtcttgggtataggcctgggcttggagcataggactgttcggaaagttaagggaatgaacgtattcagagctcagaaccgtgtctggcttgcgatgcgttctgttttgaggttagtgatgatgatggagagcggctcccgaggacgagagctcgtgatggagagtgcctctttatgcccgatgtgaatgtggctactcagctttctctctctctttttttttaaattaatttattttgtcgagacaggttcttgctctgttgcccaggctggagtgcagtggtgtgatcatagctcactgcatccttgacctcttgggcgcaagtgatcctctgacctcagcctcctgagtagctggaaccacaggcatgtgccaccacgcccagctaattgtcgtattttttttctttttctttttttgtaagggtagggttttgccatgtagctggtctcaaagtcctgggcttaagcagtccacctgtctcagcttcctaaggtgctgggattacaggcttgagccactgcatccagcaacaccccccctccttttttttttctgtttttgagtcagggtcttgctctgttgcccaggctggagtgcagtggctcactcacggctcactgtagctttgaactcatgggctagatccatcccctgacctcagcctcacaagtagctgagactacaggtgtttgccagcacacccagctcattttttctttttttttttgtagagacggtctcaccatctagcccaggttggtcttgaactcctcgcctcaaatgatcctctcatcttggcctcccaaagtattgcgattacaggcatgagccactgttaatggccccagctttctttgggttcgtgttttctcagtgtattcttttctgtcttttaatttttttatattcttgcattttagatgtatgttgagtaaaaatctaccgtatgtgattttaagctggtgagtttagtccatttactttactgacatgtttgggtgtctttgtcttattatatgaattttgctttttcagatttttttttgtttttaaaagttgtggttcctattgggcccccaacccagtcccattccacatcttcttccttgttggtttggaatcatctattctgtttcctgtgtttcttcaggggtcgtattcagcttgtaccacgaatattcagagccaacagccagcttcttagcctaccctccaagtaacacacagcacaccctgacctcgatcactttccatctgacatatttgacattgttgagtttttagttcttcttgtttaacattagacattacaggttgagcaccctgaatccgaaaatccaaaaccgaaaactttttgaatgctgagttgacactctgcaggtgatgggctgcagtcaaaacacaggtaaacaacacacagttgattcagcaccccaaggggaaaaagatcctcccagcccccttcagctttgataaatcctttccacataagaccaggttccctcatgcaagcacgtccacaaagggcgatgaaatgtcgggtgcaggccggacgcaggcgctgcaggctccttatgaggctccacatgggcgagacctgtgcgcaccgctcgtgtgtttgcgtatcctctgctctgtggtgtacagatactgttgaaaacatcagaaaggcctgcaggttacttgtatgggggtgtacagatactgttgaaaatgtcagaaaggcctgcaggttacttgtatgggtaacagtggtcagaaaaggggcaagcattcacgtttgcatgtcgcacagaaagtcagactgctggggggagctgggcagcagtgtaagagcacggtgctggagtgagtgccagagatgacctaagaaacaggaggaatggttgacgttctgtgctggaaacgatgaccagaaaaaccctgcacaaagctacacgtgaaatttctatcacgtattgaaagagtggatctgtcagcatcgcagtggacacaagccacttaacagtgccaatcacaagacaagcaaagctctgtgtaaaggccctgatcgcattcatgaagctctgtccttgggactcatcatctacgaaaggccacacctcctaacaccgtgctcttgggagtgaggatttcagcaggaattctggggaacagaagcattggggcgtcgcatctccctgtggccttcctccctgtggccttcctccgcctgccagctgccccctcaccctgctgtccacctcacggacccctcttcgccccatatgggccactttggcccccaccaccccttcctggatgtgcagaccctatgcggtgccacctgatgcttcaagactgaattttccagaggggcagggaaaggtgtttgcttttttttttttttttttttttttttttttttttttaattttttagagccagggtcactctgttgctcacgctggagtgagtgccatggtgtagtcgcggctcactgcagtcttggcctcctggactaaagcgatccttccacctcagcctcccaagtcactgtggcactatgggtgcatgctaccgtgcccggctaattttttttatcttttgaagagatgggatctcactatgttgcccaggctggtcacgaactcctgggctcacgtgatctactcacctcggcctcctgaagggctgggattacaggtgtgagccactgtgcctggccaggtgtttgctcttaaaaagtcatttctctctttctgtgtgtatttgtgttttgaggtaaaatttcacataacataaaaataaccattaactttaaagtgaaaaactcagagcatttagtacatacccaatgttgcacagctattacttctgtctacttttaacacatttttgtcaccgaaaaaatactctggtgtccattcacatagtcatgacacatcacgacacatgactgtattcccaacccctggcacctgccaggctgttttctgcctctacgtttacttattctgagaattttatacacatggagtctgcaatgcgtgaccctttgtgcctggttcatctgtattgtagcatgtgtcaggccttcatttgtttttatggctgaataatattgctttgtatgggtagactccccccccactttttttttttttttttttttttttgtagagacagggtctcaccatctagcccaggttggtcttgaactcctggcctcaaatgatcctctcatcttggcctcccaaagtattgtgattacaggcatgagcctgaatctgaaaaagcaaaattcatatagtaagacaaagacacccaaacatgtcagtgaagtaaatggactaaactcaccagcttaaaatcatatggtagaattttactcaacatacatctaaaatgcaagaatataaaaagattaaaaggaaagacagaaaagaatatgctgagaaaacactaaccaaaagaaagctggggccagtaacagtggcttaatgcctgtaatcacaatactttgggaggccaagatgagaggatcatttgaggcgaggagttcaagaccaacctgggctagatggtgagaccctgtctctacaaagaaaaaaagaaaaaaaacagacgccccaatgcttgcgttccccaaaattcctgctgaaatcctgactcccaagggcacagtgttaggtgtggcctttcgtagatgatgagtcacagggacagagcttgatgaatgctatcagggcccttacacagttgacggacacttaagttttcccaccttttggcccttgtgaagaatgcttctgtgaacgtttgcgtacaagtgtctgtttgaatccctgtcttccccttttttgggtgcgcatccagggcgggatcgctggaccgcgtgcggaccctcgctgcgcatccagggcgggatcgctggaccgcgtgcggaccctcgctgcgcatccagggcgggatcgctggaccgcgtgcggaccctcggtgcgcatccagggcgggatcgctggaccgcgtgcggaccctcgctgcgcatccagggcgggatcgctggaccgcgtgcggaccctcggtgcgcatccagggcgggatcgctggaccgcgtgcggaccctcggtgcgcatccagggcgggatcgctggaccgcgtgcggaccctcggtgtgttactgaggcgtccccaagctgtttccacagacgctgtgctgccctgcattcccaccagcaaggcgcagagcttctggtttctccatgtcctcaccaacacctgtgttgttcttttttaaaaaattataatcagcctcgtaggtgtgagggggtatcttgtgattttgatttgaatttttcttaatgacgaatgacactgagcatcttttcatgtgctccttggttgtttgtgtatttctctggataaatgtctagtcaagtcctttgaccatttttaaattggattgtttgtccttttgttgttgagttgtaaagctgtttgtatcttctggatattaaactcttatcagatatatcatttgcaagtattttctcccattctgttggttgtctttttttttcttttgataatgtctttgtattgtgtcgtgtttaatgtaaacatttcaccattgttttaattccctcttttcagttcttttctgtgtgtgtgcagtttttgggtgtgtgtgatgtgtacatacacacatgcacatatacaggtgtctaaaaagtattttgtttttttgttttaaatatttgacacttttaaattggagttgagattctgtatggagtaacgtattgttgaatgacaggaaagtatgaagcttgtcggagtgttattacttggcatagccacaggagccatacaaatgatacaaccttgctgcttgtgtctcatggtttttttttttttttaatttaatttaatttttttttcattttttttttaaattatactttaagttttagggtacatgtgcacattgtgcaggttagttacatatgtatacatgtgccatgctgctgcactgcacccactaactcgtcatctagcattattttaatttgttttagttttttttttgaaaaagggtcttgctgtgtcactcaggcaggagtacagtggtatgatcacagctcaccgcagccttgacctcccaggctcaagcgatcctcctgcttcagcctcccaagtagctggtgctacaggggcacaccatcatacctggctaacttttgtatttttttgtagagatgggatctccctatgttgtccaggctggtctcgaactcctgggctcaagtgatcctcccgcctcagcctccctaaatgctgggattacgaacatgagccactgtgcccagccagcctttgttgtttttgaaagttgaaattcatgtttttggatcaaagctaagctgtgacatataaacatgaagtgatctagttaggtttggttatacaccatgtgcagaaagcaacctcttcatgaatcttttaatgaacatctttctacctggaagaaaccctttacctactaaacttactttcacaccttcctaattttgttgtcttccgtgtttttgctagctccaggcctattcggcatttaaaataaaatgcaggttggccagtctggctgggcagttctacaggtactacggctggaggatcccagttgacttgaaattcaggttttgcttgtgaaagtagctggctggggcttctgttgatgacagtgctgtgtggacggcctggttcgctgggtgtgcctcacagacacaggacactttttagggttgcttttgaatgtgcctgaggtgaggttcctgtgttttccttgtacttaccttcatattttctgaccctcctgtggatggaaaatcgactgagtgtgtgaagggcctgtcggtgtgaacgggccctgctcagccggtccatggctgtcttaggatcccgcttggtggcgaggagggtgcggctcgtgggtggctgcctggggctaccccgtgtagacttgctgggactttgtctagacaagagaactgctgtcagtggcgcttcctgcggggggatgagtgcggctctcagcgcctctgtggggctgggggtcttgggccgtgaggccggggccaggctgcgtggcaaccctgagtcccaccctcattgtctttgctcggggccccgagaggccatggggagcctgccggctctgtgtcctccccgcactggcttttagggaaagagagtctcgtgggtcatccggcctgccggctctgtgtcctccctacactgacacactggctttcagggaaggggagtcttgtgggtcgtctggcctgccggctctgtgtcctccccgcactggctttcagggaaagagagtctcgtgggtcgtctggcctgccggctctgtgtcctccctacactgacacactggctttcagagaaagggagtctcgtgggtcgtctggcctgccggctctgtgtcctccctacactgacacactggctttcagggaaagggagtcttgtgggtcgtctggcctgccggctctgtgtcctccccgcactggctttcagggaaagagagtctcgtgggtcgtctggcctgccagctctgtgtcctccctacactcacacactggctttcagggagattgggccttgtgtgtcctgttgggtgagcagacacacaagctgtgacttcagggctacggaagttgctctgtggtttccggcactgcagactccaagtgtgagccctgtagtgaggacaaagagtggaggttggagttcagaattgtggacaggctcctgaggaccagcagaggctggaggccagggcttgcccgccgggagtgtggctgtggaaagattccagtccacagtgggggctgctgcccagactcaccctgaataaagtgtcttcagagccacctgtcctgcctgttcatggcagtgacccagaaagattcatcagtgggcggtgagttgggaacagaaagaaaacccttgagataactgggttggagacagggagcaggcttgtcattgtgcactggtgacatggcctttggcctccccagccgtctggcctgggcctcgtggtcctgctcttgggcttcatgtgtccttgggtgtcagctccagcatggcgtcctctgggccctgctgcttctgaagtgcctgtgccagggacactgtcttggggccagtggaggtctgagtatgggggctgggagtcctaggcagtgagtcatggcagaactggcccctgacttcctggttaagcctttaattctcccgaatgcctgtttttgcttctttcaagttgttgtgcttgagccactctgtcattagctgtgggcgttccgagtgccagcgcacagtgttgagcagagcgggtaggagcgccctggcttcagggagggcccccgccccctgcatggcggtcacgctgcgctgagcgtcccctcccctctggtggcctttcgcagtggtggaggggcaggaactgactggctcttttccctgtggtggctgctcgggtggcagtgagcggacagcgagggggacagacacaggtggaaggaaccacggtgggtttcattaacaatgacagtggctcaggagatcctgaggctgattaatttgcaaacagcaattacttgggattgcttgaaaagaaagttctagcttagaacaggaacctgaggagggctggccacactggaatccagtgcccactgtgacagtggagagccagcagacgccactggctttgatggatgatggagagggtcctggtgtcttctgccatttgtggggggtccttgtgtgctgtgtttgcaggcaccatgggtctccctggacggggttcggttccaccccagcgcccttgtcttgtttcatcgcccgtgtccgggctgtgtaagaagcatgtccatttgtcccgagcggagggtctctgccccgcccctgagggaggccaggaggcccttgttggatgctctggcgggcggcactgggacacggccattgcacccggccctggacacagggcggccaccgcatccggccctggacacagggtggccagggacttggcggggggagctcttcagaatctgtcacatgcacgtgaatgctttatggctttggtattcttctgtttaattttagtaaaaccgcggcccgttgcaagaagagtgtgggcgttggcagctttgtcccaggtgctgcagggttggggtggtccctgtcaccgcctgctgctggtgggggtcagctgcacggatgcacggcctcgcaccagcggcagccccagaggccatgcatagggcaggccccggtggtcagggacccacccagtcctgccaggcgttgggcttgggatgtgcggccggctgggggcacacattcatgccgcaggtccccgtgagtctgggccgtgtgcctggcgagccctgaattccacctcacgtcagccgctggttcacgtcagccgctggttcacgtcagctgctggttcacgtcagctgctggtgttgagtgttcgcatgatgcttttctttcttgggggatggatcagtggatggagaaataaagctgtgagggcataaaatcaatgtttgtttatattgataatcatcccttaaactcagatccaggggcgtcaagagacctgagcccggccccggtgtgccgcgcactggccatgtgtccggagagggctgtgattgcggctgtcagccctgtccattggagctgcagcttggtaaatgcacagatggattttgagaaggtttccctctaaagatgtgggagtctttgcacctcaccaagctgtgctggtgtggccgtggcacataccgggctttttacgtctcttctagggagtgagtcggtgggcataggatggctaaggtatgggaattttaatagggaattttctagtaaatggttctgttagtattacagcttattttagaaagtaaggtgctttcatagagaacgtttaaaattattaagaggtagacaattcttttaaaaacctgaaggtcttttttttttttcttttttttgagacagagtctcgctgtcgcccaggctggagtgctggagtgcagtggcgcgatctcggctcactgcaacctccgcctcccaggttcacgccattctcctgcctcagcctcctgagtagctgggactacaggcgcccgccaccttgcccggctaattttttgtatttttagtagagacggggtttcaccgtgttagccaggatggtcttgatctcctgacctcatgatctgcccgcctcagcctcccaaagtgctgggattacaggcgtgagccactgcgcccggccaaaacctgaaggtcttatattgtggtgtgagtttatatttatttccatcattttatatttgtcagatttttatgcaggggggctgcataatgtctccctggagagcctcagcctctgtggaagagttgggtcaggagaagcctctcggcggaggaagccggagggagaagcctctcggtggaggaaccttcacccagagaccagcctgggggtccttggcccagacgggggaggtgggaacatggccttgggttctttcctccttgcagtttgggtgaataatgtgtgatgaggcctaagaggagatttataaagagtataatctctcagtcttagagaaaagtgtttcaaagtatgggttctcagtgtctgtattgaaaaaataaaaaattcagtgaatgggtaggttatttttcgatctgagggttatttctaagcacatgatttatctttagcacgggagggtgatgccccgccatgtctttttagcttagggactgtcttctgccgtgagttggcctctctgcctgtgcacgtgtgttgccggccccggctcagctgtggcagaagtcagtcacctgtggagttatggaagtccaggcggccaccccaggccggggcctcattccgttaagtagggccaggtgtctgtcctctcacgcgtccgaggtggctgccggcgtgcgggtgtgactgtcgatgagagctctgagctgggatatctggtgacggctgcccctgcttggtcttgcggtgtggctggggagaggattactgggtggaatgtagccgtccgccttttgtgttgacctcttgacctcccttttgggaggcttattaatgtcaaaaagtgaagatatgaggatgggatcgtaatttctttgtgttgctttccagtagcccagggaccaagctgtgggaaccaggcctccatgtgctggccccaccgtcctcgtggtgcctgtgtctgtccaggcttagtcctcagatcagctgcttcaccacattggctgcaggctgggtggcagatgcccccaggaggaggagaagcatttcttcccagggctttggcctgtgctgtgtgcctggaacctttaggtgctgtggcttcgcagacccggacgcagcgtggaggccaagcggtgtctgtacaggacccttcagtgatgagggtggccaggctccagccaggtcctagggaaagctctccgagagcgacggcttaagcagttctgaaaaattgcaaatgatctgtgttcttggagaaagaatgggagagaagcactcactcacaataatgttgcacctactgtgtgcgggtagggtgcaggcagtgtggtccagtgtgagcggggagggtgctggttgaggggttagtgctcgggacgcagcctttggacccagtgccctcccaaaactctgctcatcagtgcccctgagctcagcattgacccctggaggaactgggcgccttccctggtctcagactgtaagcctcctcgggaagcagcagttggctcctgatgcagctggcctcagatcctgttgggagagcaggattggtgaggaacctggagaggagtaggaggtgctgcctgatagcagaggtgggtgatgggggcagagagggtagcaggggcccagttcagtcctgtctggttttcacgtggagctttttatagagttgtgcttctcaagcctttcaaatgcctcacagcggcagtccgacgtgcagtcagtgacagctgagtagattaccaccctcaggactaaatgcaaaatcatcttcactgggtgcagcatttacagttttggtgctggaacctcctaaccagtgttcttaggggctgtcttaccagtgaagggagctgcctgctgttgacgctccacaggaggtttgcggcatggctgccatctgtgttgtggcctgggactttcttagagagtgggtaaaagatgagtcatctcttgtgtgatttatcagcttcacttgtgcttccagggctctttgaagcgtctcactttttaatttcatgaagaaacaaatgtagtgcagagaacagaaagctgctgtgtgacctgcgggtgcccagcctgtggggcttcctcatcgcccccatccaggcagatcgagtgccggctctctgtgctctccaggaggtggcctttcacagcagggacgttctgtgctcttattttaacaactgtaagaatctgagcttggtgacagttgggtgacccgggctctgtgtcttcgtgttggccagggtgtgtcatacacctggcctggcctgcgtgcctcacgtgtggtggggatttgtgactgtccccagcaccttgacagagggtccttgactctgcgaccctgcacagtgggtggtggcaggtgggatcttggttcacaggcacaggtggggagagttgctgggccagcgtggctgggtgactttcctgtggaaagagcgggcttggggcttggtgcgtgatcccaccgaggccggggttgtgcttggggcactgggggagagcagagcaggtgatgcatatccgggcgcccaccctagcagcacaggaagggctgggatcaccactccccggggcaccgtggggacagcgggggcctgctcactccccggggcaccgtggggacagcgggggcctgctcactccctggggcaccgtggggacagcgggggcctgcttgtgttgggggtggggctccttgccccccaagggcaggccgagcaccaagtctgtgcttgccccactgtgcagcgttgcaggtgcagcagacatgaggccagctgctgctccctgcaggcagctgagggcctctgggaaggcttctctacaacgtcctgtgggaactggaaacccagatgtcagtggaaccaggtgttctgtccatcactgcctcttacctcctagcaaattcaacactggcgtttttttttctgagcaagttgagctgcatttttgggacaggagccatggctgtgtgtgctggtgctgaagggagggtctgcagggacggccacacggatggctgtgtgtgctggtgctgaagggagggtctgcagggacggccacgcggctctcgggagccgtttcctgcgctcgggctctgcaccggcaggctccacgctgagggtccctccacatccaccccatcgtgggagggaggctcagtgctctgcaggggcctgagcagtcggggagacaccccctgcccacagccaccctctctgggctatgtgggaggtgcccacgtttccacgccttcctcgtggagggtgtggcgggctgtctgtgccgcgggggtactcggctgcactgtgcacagccctcaccgcccagtgccgaaatgggaaggcctgacagggcgatgcggtctgcaccagctacatctgcagaagtccagcacgatgcagtttatgcctggcagtgatgtttgtttttaaaattagtaaaacctcattagttatcagaaggcgtaactatatgatgattttttgtggagggattatttctaccttttgtgcagagaatgcctggatcccttctgccccttggggtcacatattgcagtggggactgtggtgctctgagggttaagttgtttctgtcacctggaggctgctttttcctcaggcaattggcgttcaacaaatgacaggctgtctagagagaagggtttttcaattacatggctggacctgggttgccaaaaggaagcctcctggggtgtgttctatacgcgacatgcatttgctgtgtgtaattggaaccatgagaaaggtttttgttcagagctattggatagtttccttattttaaacctgttgaatctggaaagagttgtttttgaaatttttttctgataataacgttatataaaagtttatggcagaggagtttctgttccacacgcccctccccgagctttgtggtcgcccaggtgcctggctgtcaaggctggcctgtcccttgtgttcagggtcccgagatgtcagagctggcagcccaagtcctcccctttatcccgagcaggagaagcagtcctcactccatttttcaccccagggtatagcagcacctaccaccctgggatgaatcagagccaagaggcttggtttttctgttcttgttaaggaaattgatcatctcacaccctctcaagctgttttactttgtgcaaatcagattcctttctagggacctgcgaggagaaacatcctcagcttctaggactcccggggatgccgtcagcagccaggccttggcagctgccgcttcacctgtgctggcgtgtggggccctgacgtctcttgcgggtgtcatggagcaggattggaggtttctgagcagcaggagggcaggagaaaggccccaggactttgcgctgtggcctggcctggaaggaggctggctgggcccttctggatgcctgtagcagcactgccacctgggcagaggccccagaggccccagaggccgaggcaggctttgttctctgctgctgggactcagccctgcgggagcacagggaggacagctggaagcccagcccctctgtggctctgtccacagctggggacagcagtccagtgtgcacgggccacccacagccctctcaggaactggcctcttctctttaagacagaggagtgcgccaggtgggcctctggctggacctcctaggccatcagttttcccagcaggaagtgctgatcagactgaaggaaggcctgcgtgtgtgtgttggcccagatgcctgttagtggacgctgtgtctgcacagctgtctctgggtggctgattcatcccagcagctgactacgatggtgctaaagagaaccatcttacacggacttggggacagaaacctgggctcccctaccgaggtcaggtcctgggggtgtggtgggatcagctcccccagcacctccgtggcctggggtggggggtctgtgtcctcccttgggggcttctcacagggctgccaagcagtgtccaggtgcatgcgttgggcgtgcaggaggcctgaggccattgtccatgctggccactgccactcgcggttgtctgttgggagtcggtctgtccagtggatgaataaattgggactcagcggtttgcacccagatgcccgaggctatggagttgccgggtggtcgtgcctggggctgcctggagtggtgttgcagtgactgtccctggggatctggcctggcagggatgccacatttgggcagcgctttcctcttgaaggtgccacagcctgttagttttgatgtgttggccacgaacaggctgccctgttagcacagaaagtgaacgtgagcagtgcgagaaggctcagagtggactttccggggcaaacaactgagggccttttgggcgtcacagatttggtttagttcggatcgaggtaatcatcttgaacccgcttattagagtcagtggctttttctgtctcacagccgccttcttgtttggtttcgcgtctcacatgcattctgtgatcctcactgactttttagaaggaaaatgtttgacatttacaagaagtgagagatactcttgcaaatcatccagcagtttctggtttgcagattgatggcagccctggcctttaccctcagtgcctcctgccggtgatggtgctgccggctctgacctgtgtgaggagggccttggagagcacaggtcccccagggggaggactccgggaggtgctttgcgggagggagtcatggccgagagagggaacgcagagctgccgtgtgtggccgtgcagggccttccacagtgagttgtggggtcctgggggtgagagctgatggtggtctgaccatggtgggaggtggtccggtcctgtagaggcgtggctgccgcagttggggcgggctctgggaatggcgcggtgtctggatgtggaggagtgaggaggagccggccctgagctgcacccaaggagagggctggccatggcgggggcaccacaccggaggacagctcttctgtgggcactgggcttgaagaagctgcagcgcatccaggtggggtgtcctgaggaaaggtggcttggagaggggtgggcccctgcctggagccctggcaggctggggagaccttggtgtctggcagggaccccggaatgtcctgctgctcccccgggcctctgtgtgcagcgccctgcgtcgtggctgggctgagaggaggcagtttccctagcccctcactctggcgaatttcacattcttgataccacggtatctttgaactttctattttgaggaaagttcatttttatgtagttttagtaagtgtataaacgtaataatcttattaaaagtaatcaccatatgtatataaaatacactgtgcagaaacatccatttttattgctgtttatagagaataaaagatccttagatgcaaaaagtcagaggggaaatttgcatataatattcgtagtcctacagttgttgcttatggtgttttgcctaagaccatttctaggtgcatttttctgggagataatgtatctgatgacagttgcatgtgcagataaccggcctctcatgtatccatcccgggagtgccttttctcagactgtgtgtagtgttagtgaacttgattggtgggtgtgaagtgtacagacggcgtgtgcgtggagcgggtcgtgtgcagagccccgaacgagaccctggcgtgtgcgtggagcgggtcgtgtgcagagccccgaacgagaccctggcgtgtgcgtggagcgggtcgtgtgcagagccctgaatgaggccttggtgtgtgggtgcttcagcgtgagggccacctggggaggagtgcttatctggggaggctgagctgggttggaggcttgggtgctccccctggctccgtgggtctccattgctggcttcatagctgtgttccgttttctttgttcagcagttgatctcaagtatttattccaaagcacttgaaatacatgaacctaataaatcgaacaaatacagtaaaactttagcttcttggaacatccccatatacttacaccacgtcctaaaatcctctcatgtctatgtaaaaaatcgggtagcctgggtaacgtgggatgccatctctacaaaaaatttaaaaagtagctgggtgtgatggtggcatgcttgtagtctcagctacttaggaggctgaggagggaggatcgcttgagcctgggaggtggaaggtgcagtgagccaagattgtggcactgcactccagcctgggagacagagccagaccctgtctcaaaaaaataagaaataaatgaaatcacacttgtgtgatgtcagattacccattaacccacttttgaatggagctggaaggataatccacacctacctcggatttctctgcgtggctgttttgcataggagccctgcatgggttattcttgaagtcagcactgtaggagccgtggccggctttgcattttcatcctggttcaccccagacctgctctgggcagagccaggcatcccctgggacgctctgcctttgcgtgtccacgacagtacaattccaggcactgcctggcatctgcgtctctccctcccctgaaccaggggcgcctctccctcccctgaaccaggggctcctcttcctccctgcctggcaggagctgcgtttccttgagtctcctcagactcggcagacccctgggtggtatcatgtgctattctgaaggagcttttgcttcatggcacttgaaaaaaatcctttcactggatctgagttggtgagcatgcatcttcctttcgtaggtttgttttctgaccaggccgtgggtctaacaggagccccgaacctctgggtgggctccgtgtcgcttgcgtgcctcactcatctggcaccgtgaccgcgctccggccctgagccccacttctctgaagcctcacgtgttgcccgtgtggtctgctcctcaccgtcttttctcttgtccttgcccagttgtcgccgtgatcctgaaggcgctgacctacgacgagaagcggggtgcctgcagcgtgggcaccaacgtcagggacgccgcctgctacgtgtgctgggccttcgcgcgtgcctatgagcctcaggagctgaagccctttgtgactgcaatctcgaggtaggcccattcgtcgaggtacatcggatgcgccgtgccccctgacggcgccgtgtgtcgtttcctccatgagaggtgtgcacagcagatgctcgtgaaaaggtgaaattacttggccagaggatctgtgacaaagccaccgcttggaggtcaagctccttttctgtgggtgagcaaccagagcagaagtgtgtggaggaacattctggaggtcttggccaccctgcaggcagtggattcttgggcgcaggtgatcgacaaccagagcagaagtgtgtggaggaacattccggaggtcttggtcaccctgcaggcagcagattcttgggcgcaggtgatcggcacgctgggtggcgtgggaggaagcaagtggggcacgggaatcgcctgtgcgtgctccctgcggtcgtgggtcttggcgagaggcgaattctgtctctatctcctttcaagttcctctggaatacagcaggcatgttggacatggcagtcttcagatggtgtttgtttttgttgaggagctggattttgtgtttttgtggaccagcacttgagagaatgttcagtagcaatagccttcgctggcatgcctgatgtcagctcctctgagatgtaagtgaacacttcagaacctctgggaggtagggagacactttttccctctggcttcctgatgagaaaactgaagccagcaggtttcatgggatcaccagaaccccagaagctgtgcggcctgtggcgggcggggctcctgcctcggtgtccagtgcgcgcacccagctgagccccgtagtggtgtcctgtgccagggactttcaggatctgatactttttgcttaggaaacatgcaaaacatgtgtccccagcgcaggaaacgattcaattcaattcaaccgtgtgcgctggttttgtacactgcttttggactgaaatgagttcttttgtgctgaagaaggcaggtgcttcctttcttgttgtgcatgaaggagctggaggcgggacaccgaggaaggcgactcagtgtcactgtccgtcatgggtgtgtgagcccacggctgaatcatcacaaggtttcacacccgcacttcacctgacaacttttactaggaaaatgaactagggaaactgacttcagaattatgcccaagtcttagaagctcctcctgcagctgttcaggagccgagcgtcccctgctcactacaagacgcctgaaggggtcatgggatgcagcgtctgaagcttccacctggaagtgcactgctccttttggtctgggcggggcggggcgccggtggcagatgcccctggtggcaggctcaggctactgtgctgggtcccctctgccccgcacgccccgcgagcaccagcagggcctccccggcatgtggcggggccagcgttggcctggggcccgcttggctttgatctcgtggggcttcgtcttttggacgtcctgggtgcgcctccactgtggctcctgggttccctcacgcacccgggtgtaagcgccactgcctgtgtccgacaagcagctcgttgtgaggcacacgctggtaagcagctcgttgtgaggcacacgctggtgtaggctccgaagggtctcggtgacaggcgcttttctcttgttcctgcccactgctgttccatcttaccaaatactcagtagcgtccggagagggacctcaacccggttacttccctgggtgtgcagcacgtggccagcgtctcatagtctagattcttgcatcagagcgaagcctgagaggagccgagggtcctcctcctatccagggagaccgtgtgtttcccgaggcagctgtgaacacgcacgtccctcttgtcctgctcctcttcggaggagaacagcgcggctggagggtgctggtgctggccaacgtgttatggagagtgtggcttacctgaggccagggaggtctggggtggctgagagcggctgtggcctctgtctgctgctctccccagtggccactctggcagcgctgctgggcaggggcttggctgctggtggtcttcagggagcagtgccttgcagagtggagcagagaagacggagaggtccggctttaggcccctgccgagctcctgaggccctgccgcgtgcctgtgccagcctgcagcgctgctgtctgtgtgcgggagctcttgtgtgtgatcagcctcaggaaaggctcttcctgttacttccttgtgctgctcctgcacttctaggaagttgatcctgtaactaggaagtgaaagcaaaaaaatgtatctttcttattgttgataggaatagtcacagaacgagaaaacttccttacgttgatatctcattcagtttccttagcaaccctgagaggtgggcaggggccaccgtcattctggtttcactgaggaagtcaggacagcactgaagacacctgtccagcaccttgtgctgacggcttcccagccaggcccatcacctggtggccgaaggcttctgagccaggcccatcacctggtggccgacggcttctgagccaggcccggcacctcgtggccgacggcttctgagccaggcccggcacctcgtggccgacggcttctgagccaggcccggcacctcgtggccgacggcttctgagccaggcccgtctgggcagcagctcccaggccctggcccggggctcagcgctgcctcgtggctgagaagctcctcaccacctgctgtgaggccgtggaaagaccctgaatgcagacgtgtgacggctgcagctgcatctggcccctcagatggtggttcccctttcatggtgaaaatcctcacggatttccttttcagcctcatattttgtctaagagctgtcaacatcactgaaacctgggcctgcccttcatcctggggaggactccctggtccagtgtcacaggaggagtcgggccagggttgagggctggcacaggacatgggggtgagacgaaacctccactcacctgggagggtgtctaggtgggcacggaacccagggtcgtgtatgggccatcactcatgggttctctgttttgggggaaagctgatcccactggagggtgactgtaatgagagtctccagatcaggtgccgactttggagaaatgcaggtgcaactgtccgaacaaatcaagtccccgctactggacggggctggcagctcagctggggccggagagaaaagtcacgagcaagaaagttcttacctaaggtcctggacaggcagatacataacttctgcctttggcaacgttagatgtcatcgttccagagtaaaatacctataaaaacctgccgatgcgcggggagcctggccttggtctgggtgtggagggctgggggccggccggtcggtaggtcctggtgcaggcgggccccgtgcttcatggaggttggcgccgctcggtggcctgctcgcttattcttaggcctgattcacagaggctggggccactcagtgatctgttcgcacattctcaggcatgaaccttcagggctggactcctgttcttttgtgcagtttccacaggggaccctcttgctccagggtcatctttctcactttgaagccccttgagccgcccctgcacagcctcctgttggccccgtgagggtcctgactggggctcctcttttggagcagctgccacgtgtggaccggcacgggcatggtcgtggtctgcccagctgggtgtggggttgagcccatcatgctgtggggtgctccctgggggttgtgtgtgtgtgggtcccacggtgggaggtggggttggggtgagtgtgacttctgtctggggcatgttgggtgggcgtgcaagggggtcctgggactcctgagtttctcaggcctgaaggactgtaggacgcactgtgggctgcaggcttgaagaaggatgtgagtttctggagtagcctggactgcacagccagggcctccccggcatgtggcggggccagcgttggcctgggtcccacttggctttgatctcgtggggctttggtttttggaggtcctgggtgcgtctccaccatggctcccgggttcccttgcgcacaccgagccagcagctgctggggcctcagggctcgcagctcacaggcttctgacgcctcagcctggagctggcgttgtgcccctcgcccctttacctgtgccatcccggccgcagacccaagggtgcccttggagccgtgcccgccggcctgggtgtcaggcttgtccaacgggttcttagagaacctgggccccatccctccttggcccacgcagactccaggcatccggccgggcgggctgtgagtcaggctgcaccaggtgagcgtgtgggatgctgctggtgcgagcctccctgcccaggagccctgcgcacccgggtatcggttggggtgtgcccttccagatctccctcccttggtttgtcataggtgaccacattttaattaccagcttttatgcccgtcaatttgggaacgtgatacaatcttgatttctctaactttcacaagttcttcggtgggtcctgtaacagtgggtgcttgggatcagagcatcagagtggaattttcgcagggaaatggaaatgcctgatcgagctgggcggtggcagcagccgctcctcactcttcaggtgcctggctcttctgagagtcagttcgggggtttagtggctcactttttctaattggttcctagctttttgctaaagaaacttggattaactgttcttttgcctcatggtgtgaatttatactgttcctgttttataaataccagaaggagcttcgtaggtaacttttaccatgtgttgaaggtagcattggttttgaaaacctgatttcctcagtgtcgcacacgggtagcttaagaggtgggataattgttggagtagtgaatggatttccctgagaagccaagtgcaatttaggggcagtgacagtgcgaagttaaagtgggacagagtggttatgtgttatctgcaaaatccctcctaaccagtaatcacagtctaatttgcaagaaggaaaagaaagccgagccctacgctgctgctgctgccattgtgtgtccagtgatttcctcacctgaaactcttttgtaagcagctcatgttgacatcagctccgcccaggcagccacggggccctcccctgccagggggcagcctctgactttcggcctccacctcgagcaaacctgctgagcggcgcggcccagggaggatccgccgaggcctgcagatccgagatctcttcctcgggggcaggattgtcctggaaaatcaggaaatggcaggcattgctcagagctacgtcttgttctccctcaccggtgttgctcagtggcacagcttccaggggaagacaacacgtgtttttcaagaaaagttaagtggccattaccgagcagagtcctaaccctgtgaaacccggcaaatcctgcctccacgtcagctcaggtgtgactcgaaagcacttaaaaaattctcgtgttttaccactgtgttgattagtgtgagctttggttcttgggggttaggaaaattcagccataggcaggtccgatatgatttgcaactttcaaaaaacaggatggctaaataacaaattactagtctgatattttttaaatgtctgactttcaaatgacacagaattattgtttcttaaggtaaaaacagtgtatttggctttttattgctataaaatattatataaataagaaaacttgagctggggtgaggtctgcactttgctgtacctgccgaaaatgaggtgcctggagcttgggacaagtcgaggcgtgcacttccccttgactcggacaggaaagagaatccctttctgtttgacacagaccatttctctgtgttgggaaatcctggtgaagtatcacataaacttctccagcgaaagcaaacgggcgaggacacctagggcacgtttcagcgcagacaggccggcccttctcgcggcctcgcagtgtctctctccaggttcccggggatggtagatgaacgtggtgactcactcagggtgttcctgcgaagggaaactgagaggcccacgtgggacgttgggtgtcctgttggagtagtcctttaggaaggagcttttatatttatatttaactagcatcattaaacctgtttgtatttatttctcgatgagccagttttgttctgagaatgagaaaatagagccgttttaataaatgtccaaatcaggacagtgttaaatttgttgtaagtccatatatagttgattggtcgaattaacttgggagtctgtgtttagttaaaaacagcgtttctcaggcgttgctgtattttctgtgaggttcagtaaaatatacacgcaacagcaaccattttgacttctcatggcaggagccagcttcgttgaagtgggccaggctgaagtgaggccagctttgcctgctgcagccctgtggtctgtgtccaaattgctgagtactgccgggagagggagccgggagtgcctgcgtctcctgctgtcagccggtctgactgcctgagcggagctgttgaagtggactgaacaacagtaaccttagagggttagacttggtgaggatggtagatgattttaagtttcttctcttttttccattctttcttcattaatcaatgttccacactttaaatatagtaatttaaacaaataacacatttcaagaattcagtgtaacatgtgacctttcagtagtattggctggagccggcggcaataaagatagaagcctgtgttcctcttgtggcaaatgttaaaggaaaccagaaattcttgattcatatttttccctagaacacgtggctttacaggtttcaaaaaatgaaactcttgttcatatggtaaatatgacacacatttctatgcattctgaaaagatttagaataaactgccatttgttgttaaaaatagcagttatataactttttttttttcttgagacggagtcttcctctgtcgcccaggctggagtgcagtggtgcgatcttggctcactgcaatctccgcctcctgggttcaagcaattcttctgcctgcctagtagctgggattacaggtgcgcatcaccacccccgattaagttttttgtatttttagtagagacagggtttcactgtgttggccaggctgttctcgaactcctgatctcgtgatccacccaccttggcctcccaaagtgctgggattacaggcgtgagccactgcgcccggctgtagttatataacttttagttattagaagatcacattcatatgtcttgatcagtttaatgatttctaagatatcattaacaaaagccattatgatgtattgaaataggattgatcttaaaacgttcgtgctaatgtaacgtgagttccctttaattttaaaccagtatttttctcttcttatttaggctatagtttgttataaagagtatagagaggaaaatggagtgcttttctgttcatagagtttttctgaaattaaagtcaaaattttcagtttcaagtagtgaaagcagtgttaacagaaagtttcccagatactaatcctgggtcttttaagatctttagataattagttgctttccaaaatagcttttaattctgaactcattttagacttaaagaagaattgcaaaaccagtggagttcttctagaccctccacagcattctccgatgtgaacatctcacatttggaagccaggaagtgcagtgtgggataaaggccactaacaggctggtctgcccgggaccccgcatggcatctggtggtcctgtgccctcagcctcctctgctctgtgagctcctcagtctttatctttcttgatcttggggcacttaaaaaataggttttattgagatgaattcacttgccataaaattcacccctttagggtccacagttcagtggtttttagtgtattctcagacttgaggagacctcaccccagacagaagccatgtgcaccaggtcccgtcacccgctccaagcctggcactgccagcctgctttccgcccctgtggatttgaccctgagacctccagagacgactggccagatgttctgtaggacgcccctctctctgatgctttctcgtgtgttactggaaagagtgatgtgaggtgacctgccctcctccgtgtgctgttgggcccatatagtgccccacaacgggtcctgcgtggtctggaccttgatccctggtcaagatggggcctgccaggtgcctccacttgaggagactgtgttttcctctgtaactagcagtgttcttgtggggtactcgaaggttatgcaacatcctgctgtttctcctttggttttcaccccatccgagctctgtccaaagaccttgttgtgtggtctggtggtggttcctgtgtccccaccccgacgttcagtgattgcagcttgttcttaaggaaggctcgttcctctcccagctttatttcatcattcgctcctgccagtgtggactcatgggtgctcatcctgtttgggggttatcatctaacactattgttactagttttgtttgagttataatctaacactaactattgttattaatgttgctcaaattgctccagctttggccacttcaggttggcttctgtgtcctttcagcaagatcctgttcttttttttttttttttttttcttttttcctgagccttttttctttccttctggcaccacaagatgcacctggcttatctttttgcccctgccccagccctagcatccaccacttcccaggagtctcacatcctctcggtggagaacagtatttggaatccaggacgccgggcttggcctcagctgcctctaggtcccctccctctgtagctgagtgtgtgcccctcttcacagtccatgtttgcacagacaccagctctagcccagcttcctcctggcctcccttcgtgtgccgcttctgggcctactgtgtagcacgctctgctgccgtgcgtctgccgtcatgcatctgacgtgattttggagctgccagcccacacctgtgtgagcaacagactcaccactcagggtgggacgctctgtgcatcctcctcaccctgggcatagcgttgccaggccatcgctcgggtgagcccttctggtgctgctggtctgggatgcagacaagtctgccggttccctctgtgctggtccgggatgcagacacgtctgccgcttccctctgtgctgggctccccaggtctgtgattgttgcttcttcaatctgcatgtggttgtgttctacaactcaagcaccaaacaggacagtccgtctcccccaaaaactccccagtctgctccccaaccctgggccaacattggtctgattttggtcctgatagtttaccatttctggagtgtcttataaacggaaataatcagtaggcttttcattctggcttcgttgacttggcacagtgcccttaagactcatcccagtgatctttcctttttttttttggagtggtgtattgttggacggacctggcggtcacaggcctacctgtctccttgggtgtctccagtcctttctggaggctcaggggggctcaagggaagactctgcttccctgcttgagttgcccgcattcctttgctcatgggctcttcatctaccttcacagccagccacgtccacgtctcgcttcatccttcacgtaccctatgcctgtggtcctttcttctgcctcctgtgtctgtccttccttcttccttcctgtatgtatttatctccttacctgtctacttatcagtctgtctagatggggtctcgctgtgttgcccagactgtactcaaattcctgggctcaagggatcctcctgcctctgcctcccacagacagatggagcacaggtgtagccagggccgctggtgtgtaccactgtgttcggcacccgctgggctgcaggagtaatccagggccctctccccatcttagggtcaactgattgccaaccttaattcccctttgtcaggtaaaggaacatgtttgaagtgggacacccttatctttgggagtgggtattattctgctgaagacaagggtggggacagatatgctgtgaccagggtagttgggcttatgactttgttgttgtttacgtggaggaactgaaagacctgggtgtgctgctggatgccccaaggatctggcaggaggaggcatccaggccctcagggcaggtagcgggtgggcctccgtggtgttgggaggtgctgggcccggaggtatcagcaggaactgcagggtccctaccgcaggctccccacacagtgacacctgtctgtccgtccgtctgtccacaggagcaggaggggctgggcggggaggacgcagggtctgtcggagcatagcagtggcccgtacgtgagggactttgttgttgccgtctccccagggtgcagagcgtggtggtttgtggccatccttgcagtgtgagtgagcaagtggccgaggggtagactttggatggctccaggcggaactcggggaaggaggccgtgtactcccatagctctgggctctgtttgtggctgtggccacacagggcagggcctcagggcagggaggccagtgcttttgggaagggcctcccccagccctcagaagcctcccaccctattccccttgggctccatccttctgttttttttctggctctggttcctggcgtctgtttgcaaggctggctggacactgcaaccacctgggcttgctgctgtggcctggacgctggggtctctctcggcccggtggtgagctgagaagcggccctgtggtagaagagggcctttccacgctgagaccacagattgtccctgcaataagcaaacatttctctaaaatgtgagataaacgctttatccactggtgatccgtggttgttagtaattaaaccaagtaaacggtagctcattcggtcaggccgcttgccgccgatgaggggtgcagagcttctgcagcatcctggggaggtcccggaacgtgggtctgggctgtgctgatgctggagcagccagcggggagagctgccaggccactcctgacagccccgcacccgctctggatggaagcttctcgctcccagccgatacgggcctgctgcctgctgctggggctggaggggcccctctgcttgagccttggggtaccccgtgcctacgtgccctcctggctttgcccatggttggtggccgtgttttgggctgcgttgatgtcgttgtggagcccgctctgggcctcggcacgtctgagcttgattggggtggaaaatgcacctggtggtttgtattatgttgtttctgttttatttaatttcatttgccattcttatttcaaaagatgcttcctatgtttatgctatattgttagtttaacttcctaccctttccatctatgaatttctgtttttattgtggttctcagtgaccacactctaggggtcctttctctctctctctgtctctcccccctctcccctcctcccttcctccctccctccctcctaggcagagcctgtgagacttgcaggcatttccccagaacccaggccctcttggccatctggctgctgccccacccaacctttggcctctcctggggctcctggatggttgggcgtcccaaatccccatcagcagagcacttggtcacaaggcccgagtcacatgccccagcttctccgaggaagtgcagagtccagccgcagggaggactttctcaaccggccctggggccagctgtcctgctcctccttgtttgctgtgggctcacctctgtgggctgctcactcagacccactcgcacccatgggaccttcccacctgtttctcctgcctccttcagtctgtgcccagcaccccgctgtcaagcccattcccccccagcccctgacgttggacatgctggaggagactgtggccctgtggcgtgttctgggccatctccagggcctggagcgggcacctgtgcccagcactggaggctgggggacaagtgctctctctgataaatgcccccgagtttcagttctgtggctgtagtttgtaggtctcctagctcagcatccccgagcccatgccctggggactcatggggccgaggagagaggagcgcagagaacatgaggatacgtgagccccttgcctgagaggtgtgctgtgaacctggagagcaaggccagtgggtctggggtgacagacagtgcgagatgcaggaaaacaggctcgagatgctgtgaatctggagaacaagtgggcctgggtctggggcaacagacagcgtgagacacaggagaacaggcgggatgctgtgaaaccggagagcaaggccagtgggtctgggtctgggtctggggcgacagacagtgcgagacacaggagaacagacgggatgtcatgtgcattgtggctggcagggccggcgcctcacacacacgccccggaagtcaggatgtggtgctgacggtgtccgcgctgccaggctggagcgggtgacggtgcctgcgctgccaggctggagcgggtgacggtgcccgccctaccgggctggagcggagcttgctctctctgcagtgggacctgctcacttttccttagctggatgtatctttcacatttagcttaacagcagagctggtgagaggacgcacacctggcgtcaccattgtcccccgtgcatgtccccggcgtccttcatgttgacgcgggccccgccccacggctcaggtctgtcaacttccctggaacaaggcagagcacttggcccctggaagacctggaaaccaggaacctcggaggcgctggcggccttggaggccgcttatctccgcgtgtctgaaattctgttttccaccttttccctttaggctggtaggaggcgcaatctctcaagccttccttagaaaggatgattgtcctccaccctgccccaaaccccctgtgttctgtgcaacgcctgatgagagcgttctgggttattcacagtaactgagctgggtgatctcacaagaggacataatgaagcccaaggagcctggtgggggccgggagaggccttgctctgagtgtggctcgcatgggggcagcgccttggcgtctgtgtgtggtgcggtggttttcctgccactctgtggaaggggcctctgccagacgccttgtcttcagggcctcaggtccctctgggcacggtgggtgttcatgtgtttctgcagggttaggctctgtgcatggcgtggtctgcaggacctggacagcccctgccccggggcatttgtgtcggccaccttggtttgcccccctgtccaaacgctgccagttctcgtcctccagggcactccgtttctgtcttttcattcactggacctccccacctcctgcgccgccccaccacagcaggccaggtgcgttctgcccccaggccctgtcctcgtggctctttgatcctgtgccctcggtgtgcaccgtctcgtggctctcgttagaaccagggtcggccacccccagctcccacatggcgtctggtgtcttgggggtcacatgtgtctgtctgcagtccctgggtgcctcaagctgtgtgttgcctgtggggcatgtctgaacctcaagtgggcctgagtcgtgagagaaaggctttctcatcgatactgtgtggtctgtactgttttgcagaatttctttttaattaatcctttctctttttcacagtgcactggtgattgctgcggtgtttgaccgagacataaactgcagaagagcagcctctgtaagttttctcattttgatatttcctttcctgaaggtggggggtgggcctggtctccctgatgctcctctgtgcactgctgcctggccagctcacccatccacagcaggagccgcgagggagctgctgagagtgccagctgcgggcaggccactggttcttactgtctctgggcgtcttcagcgtgtgaagggcggtcagggttaagcatccccagagctgcagccatcactgctgggggttgatgggtgatggaggcgagtgggaggtgcccgatgacaggtcttggtgcaggcagctgcacgctgaagacgcagaagagagtgggttctgcgagggtggccagaatgtggcggcgggacgggtcactcaccgggtggctttgagcctcgggaggggctgttgcgagcagtggtcagctctgcttcacccgccacactcgcctgggccttgctggatgtgggagctgcctgcaggaccgggtgcgtcttgaacacagatggctggtttcctctagagagagccctgtgacgtttggggtgaattctgggtgtgaggagctgtagcaactgctgctgcgctgagcagactacttcatttggctcagagctgggctggagtgaggcctgtgtctcttgggaccacagagagcggacagttgagacggtggaccagtctcaagataagagtctttatttcagatacagataagacgctgaacacgttttaagagggtaagaacagagaggcagccctttgagaaagatggaggggtgaggttggcttttggtgatggggtgggccccacagttcctcatgggctcgagctgctggaactctgtgtgcaggctcagcatagctggcttagtgggaacctgttgagggagccgttcacactccctgatactgtcagacttgggggccagtggaccaggtggaaggggtgctgggactggtgagggtttcctgtcagccctgcagtgtgtggcccctggtgagtgggaccaggcggaaggggtgctgggaccggtgatggtttcctgtcagccctgcagtgtgtggcccctggtgagtggggccgtgcaggtgcagtgttggttctctctctctctcaaatgcaggagctcagatgataccctgaagtctttctagctcaaaatgtctgtcatcttctatagcttctggtggtctgcctgctctctgtatcctgaagtagttagaagtctttctctgcctcaggtcctttaaaactagagagaattcaccaggagagctcagaagctcttctctgtccctgaagctgctcttattttgtcttcagcatcagtaaaaacctcataattttttggggaaatcatcacatttttgccctgctatttacccaaaggcagtaaatgtaagactttgaaatataatacaattttatgttaaatctgtacttaaattaagcttttagattttctttactgcaacctaagacatttcatgggaagcagtaataaaattaaagtacttaggcttctatgaaccctgaatatgaagtgaaataatataaatcatttttcacattaaaatccctttaaattggcaataaatcttttctgataaataccaccgagtgcacctagcttaccctgtagcttgcaaaattaaaacagccaaaggtaaaagacacctttttgaagcttagttggaaatgtgaggattgagggcctcataattgggaatcattttttggagctgctgctttcagataacaatgtctcggtctttctggctcagcttggcttcctgtttgacgctgtgtcactgggtgaggtcacccctgtgaggccctgaggcctcttcagcaccggccaggaggcagcagcaaaaggcgttgaagtcctgtccctccttggggctggacacggtcccttgcccctgaactctagacgccctgcattgccctggtgctcccatgtcaagactggccgcggtcgtccatcccatggtttgtgaccctcccagcaacgctgtgaggaaggtgctgcagctggttctcagcattggcaggagcatggcgactcaggcagtcagtgtgtgagtgagtttgtgaaaacagttccagctgtgttcgttgctgaatgctggtttttctgcatattggaaggaatctagcagacccccaaacgtgctgacattgcaagaagacatgtctcccggcggggaaggaatgggcagtagagatggggtgtggtcgtggcttcttgttcatcatgaggaagggagatggggccccgttcactcacagttaaagtaaaggcacttaaagcctacatttaactgagaagattttaaatctttttcttccagcatttcgtttgatacatagtgtctgacctctatttgtgactttttattttgggataattgagatttatatgcagttttctcccctcccctcccctcccctcccctcccctcccctcccctcccctcccctcccctcccctcccactctgtcacccaggctggagtgcagtggtgcgatcttggcttattgcaacctcggcctcccgggttcaagcagttctcctgcctcagcctcccgagtagctgggattacaggcgtgcaccaccatgcccggctactttttgtatttttagtagagacggggtttcaccatgttggccaggatggtctcgaactcctgacctgaagtgatctgcctgcctcggctcccaaagtgctgggattacagacgtgagccactgtgcctggcggagatttacatggagttttaaagactaatgcagggagagcccatgcgtgtttcaccattgcctccatgatgaaatctggcaaaaccgcaatggaacatcacagcctagaacattgagccaacccaccagtcttattccttcttccttggttttacctgtactctgtgtgtgtgtgtgtgtgtgtgtgtgtgtgtgtgtgtgcgcgcgcgcgcacgtgcgctcacgcgtttacttctgtgtgattgtatcacatacaaattcacgtatccaccaccacaatcaggatacacagcagccctgtcttcccgagaggcctgtgctactgctttgcccacagtccctgctgtttccctctcctgacccttggcagccaccggtcggctctccgttgcctattctattctgtcatctcgagaatgctgtgtaaatggactctgtggcctctaatgctgtagctttcttctctcggcacagctctctggagacccaccccgagcgtggtgggtggtgctggtttgctgcttctgttgctgagtggtgccgtggtttgtgtgaccattcatgtattacgacatcaggatggtttctagtctttaagctgctgtaaacattcgtgctcaggttttcgtgtgagtgtaacttccatttctctgggttaaatgccaggagtagtttctgggtcgtggtagttggacatttaaactgctttctagagcagctgcaccattcacgttcgcaccaccacctgcccgcagccctgcctttctctgtcctcgcttgtgtctgacatggccactgttttctgtgtcggcctttttgacaggcatgtggtgatacgtcgttgtggtctttacctgcgtttctgtcatgcctgatggtgtggagcatctttcacgggcttacttgccgtctgtacctcctctttggtgaaatgtctgctcaggtcttttactcatttctaagtggattgttttttgtagttcttgagtttagggcactctttacatatgtaggattctggtcctctgttggatttgcgtttggctttctcccagtctgtagctcatctttccgtcctcttcatagggcaagagtttttaattttttaattttgctggggtctcgatcagttttttgtttttgtggctcatgtttttagtgctttttaagacgtgaagactttcttaaggtctgggaactccacctcgcccggtcccggggatgctgtcccgtgttttctgttctgctggttggtctgcgtgtctgttctgccagcgcacactgtgtgacgggctgtgctgcgatgctgctgtgcatagtcagccttcgcactgggcagggagatgcctcccagcgtcttctttctcaggactgttttccctgttttagggcttgtgcttttccacataaatcttgaatttttaaaacatcttttagataccactggaatggtacatgtcttcctaatagtgtatgttaaattgatgttacagtatatctttgttgcattgccttttggcgggttttgtttcttactttcctaatgaatttatcacaaaagttacaaatttgcaaagcagcagtcaggcctcctcccagcctgctgtgaagcgcctgtttcctccaatctccagcccagcccaggggtctgccttggagccacccgcacgtctggtttctgtgtgattggccagaggtggtgggcgcgtctgctccttttccctggggggtgggggcacagaccctgggtggctgtgttcggctccttacttggtgcccgtctgtgtgtgctcctcccagcagccatcgctcaaccttgctctcaggaagcccccaggcgagtgttggcaggaatcctgccaggcgggaggtcgctcctccagagcgtggtccctgaagccgccagcctccctggcctcgccccttgctggtggtgtgtgtggtgtggccgtgggtgcactttgctgggtcttcctgggacactgaagtctcctgtgtctccagccctgagaactcggagcccgggtgcttttgggaaggacggggcaccagctggtgacacatgggaagggaggtgtggttgtcaccttgcccaggtaacctgctctgcctggtcggtgcgcctaaggggggcagggtgtttggggaggacatgagaggcctcctggaagcacttcatcctgttgaagttcacattttgaccttttcagcagcccttgctctgggcctgtgcccggccctgggactcggcctggagagcctattgacaccgtgccatgggtgcgggcagggcgccctccctggagggcggcacgtggtgccagttggtgaccatgagctgcctcactcctgaggaagagtgttcgggctctgggctttgatttaacctgcctgtctgtctctctgagttgacagccggggcctccgcgtgggtgctgctgggaggctcagtggtaaaggccacttttcaggatgtgtctgattttataaacttgaattcttaaattgtggttttaaagagcaccaggacgtaaaaacagagtgacgcaccttgaggctctgttcagccaacaatgagggcttttatttaaaaaataaagccgtgggtcattcacgttgtgctgtttgttctgaacttgcctctggtgttggcggaagctgacctcgctcacctgctgtgtttgttctttgctccgcaggccgccttccaggagaatgtggggagacaggtatggctgctttcaaacacctttattccaaaaacttcctgcgggtttataggtaggaatcttgagagctataaccctggtgtcttctcgcactgtgagatgtggtgtggctacatcaatgccagggtcatgagttcactataggacgcacatgttaaacagcgagtcctgtttcacagggaacctgcatgtacagtaatttacacacacaggccggaaagctgtgctttacacgttgccaagagccacataatgtggctctgcagggtggggcgggtccctgggaccagcctggccttgcggggacgcagacctgaccccgcctcatcccacacagagcaggagctggctctgttgacgtcagcttgtgcctcatccagaccatagacgggcccagaagtcagctcccagaagctacggaccccatgaccccacgaccccacatcatgctggggctgcttttgctgtgccctctgaccctgacatctggtcactggtcagcttcgcctgtgaatggggggccccaggttactcatgttgtgtgtgatgacgtcacatcttgggcgtgtggttgggtcttgcaggagagtgggacagaggccggagaggggaccggggtctgggctggacctgggcggggagcaaagttcccacgagaagtcagccgagaaggctctggagttcccggacagcaaagcaaatgcagccggggtctgggctgtggccaggtggtgtggggcggcatggggtggacgtgggcctgcggacccttctgacctgtggggagccctccaggcaaggtgtctgacctggagtggaagcattgaggccaaatgagtccacaggaaaagccggatgccagagtcagctggagaggcgggcggacgaggacttgcgcctgttattgaaatggttctggaggagcctggcgtgagtggtgtgggcggctttctgtagacggagcccaggaaggggcgtgactacttcttgctggcccgaggcagccgaggcccacccagcatccttggggtgccgtggggcctgcatgtgttcagagccctgagccctggtcggagccagttcactaggaagagacaccagccttgcaaggggagcctgggtgtgcagacagcaagagccgcccaggccaaggagaatgtgaacgaggtttggtcttttgagtggagagtgtggctgctgtgaggaagaaggagcttgttggaaaccacttagctgagcctagggacttgccagcttcctggaaagtgagagcccaggagaagaagtctccctgtccctgggcttccagcccctccagagcccccactggagaggggcgtgctgaggccagagcccggggtgacgaccgtgctgggtgggccctggggcgcactccgccatcactctgtgttccgggttcccagatgctgcttcctgggaggagcagcccagtcgcatagggagccacggggccctgcagctgagctgaccagcctccctgtgtgtgtggctggatttgagccacgttacctttatcggggcagctcaggttggggattgattgacagggaaaggaaaggcctttacacttggtctaaatttaggcaagcagccagaaaatgggatattcccgtgggtgcgggagtcttgcacctcagtcctgagcctgagcagtgtgagtctcagagcatcctgcacagtgaccagcatgcggacggcagcgggagcctcgtggaagaagcggcacagattttgaagagacacagactttgaaagaaatgcaagacgcgcaggtgcggagcgtctcccagccccgcacggccatgtcctgctgaggttggatagaaacatttgagaagaaggtcgagaacttggcaaggcaaagcaaacgggagtggacgtgtcgcatagcacacagggaagcagcctaaaaaccctcggatttggaggaggctgtttctaatacacagatttggaatgaagttgtaagaaatgcgttacagtggaggccgctgggtaacagcagcagggatggggggtggttggggagcggcctgggggacacagagggggctgggggcagagacgagggaccagcttctctgtccaggttcgtcttggctggagttggagactctggtcctgagtggtctctgccttctccctactgagcccaggggctcttgagcaggttgtgactaacccatgggcagcttccacgttcagggcctgtccgacattccagccctatgaccctgctcctaggcgagtgctgtccaggcccccgacaccatcaggcccttgtggtggcctgtccacacccaggccccccacttcccccctgcacaggtgaggaagttgaggctcagggcagctgagcccgcttttgtctgctcggagcctgttgttccagccctagcctggccagacagagccttggcccctgtgttggtcttgctttgttctcaccgtggggggatgctggacacagagtccccttgttcttgttctcggtgagacctggtcctgggccaccccggatgtttccctgggctcctgcctgctgtgatgtggggcatggagttgtaccccagtgggcgacatcccaggttgtggcacctgctgtctttctgcagagtgagccgcaacagctccacctgggtgcaggtttctcccctgttcacggttcagtgaaggatgctcatgctgtcactgattgcagcagcctcaggcagaagtttatggtatctccatcagcccaagctcccagtgtaacccttgggagagatttgctggaagaaagccgcatggtacctgctcattccggcctctcctggtgggaaggagggatgtggccccgggtgttctcaggagtgctggctgttcagttacgttgacttgcgaagctattacatgaaggtgtgaggttttaatggtcaagtgcagggtggtgatgaatgggttaaagacgtcaaggaaggatctgaatcccggcctcggaggtgggcaggcttgggagacctttgaaaaaccctgctgtggtttatagctgtaaggctttctatgtggggtttaaagtttgtcatttgtattttcttaggaaattatttatgttgtttccagaatttcacatcctggaacctgagagtggtatcagtaacaccatgtaggctgcggggctggagctggggctccactgggaggctgtcgtggcggggtgggaggaggtgccgcctctcccatgtcagagcctcggcggctgctggtcctcgatgcttctggggtcagctgtcaccacccccaagaaccggctgggccagctgcccccagtcaacgtcttgcctgcccgggactgctgagtgaggcctgggctctggtccaggctttgtagaccgtgcaggcggctgcatccccgacctgacccaggcctgctcgctctggtgtgcaccgacctgccagctttgtggcactttgtggcatggggctcaggccgatggaggtcagtggctgtaacactgttgagacctgaagaccgtttacggtgtatgttttcgggaaaggtctcttaccacgtaccgaagtggaaatgtttgagttgtttgaaaaagatgaaatacttgtgagtggtttcaatgatttagcgtggtgttgcctgggtagaccgtcaggaagtcagtgtgacgtggaagtcctcggcgagccatgtctgtggtgtgtggcttgctcaccacctgcctcagggctcggggttcatgagtgtaaatgtctgtggatgtgattattgaacttggtgaaatgcctttgttcattcaaattcttctttttcccccatttccactttcttattagggcactttccctcatggtattgatattttgaccacagctgactattttgccgtcggtaacagatccaactgtttcctggttataaggtaagtctttaatgtatatcacaaaaatagaatactctaaaatcagattggatgtcagaaatcagctaccaccattttcttttttcatcctgtaatgtccactcaatggaatgtagtttttgtgtgaaaaattaaaaatggaattgggaacagtgactgaaacttgtgtttcatgttgattggacacacctcatgctttactacgctagataggggacatttactcacgtgttaaagaggggctcagcttcaggagtgcggccttgccgtgagtgctgtctctgcttatgatttttctcctggtcgccccgttttacccgtgctggttctgtgtggggcttggagtttgagaggaagcagctgcaagcacggccacacctcctcctgatgcttccctactggatgtcctaaatgctttcccaccgtgaaatcttggattagaagggactgtttctttctgtttcggtaataggaagtgttttgaagttgaagttatctgtagattgtctatgaaatgagtaagaggtattttagaaatcaggttagaaacaaatgtttagcacctctaattgcagtttacagaattatatcaaactgttttagttgtgtaattaggtactggggaggttacttcagttatcttagttgatccattgcagcagaaatgtgaaaaagggtgtgactttatttatttatttttggagacagaatctagctctgttgcccaggctggagtgcagtggggtgtgactttatgaagtgatttatttgccttaaattaggaccagaagcatgcccgatgcatttttaacattaaccattaaataccctaaagatcgattccccaacagccctgctgtgtagaccgtgcagaaaggacgtttctccgtcaccagcctgggcagaattttgaaaatgtagcatttggcctctttcccaggaaggatctttgaacacacttatctgtatttttataccctttcaggtttcctcaacatttaatgtccttttttgccttatcagttctttcctattaatacttggccatatattttatgtggaaaatctactggcccgatgcagtggctcatgcctgtaatcccagcactctgggaggccaagacgggcagatcacctgaggtcaggagttggagaccagcctggtgaaaccccgtgaatactaaaaatacaaaaattagccaggcgtggtggcgggtgcctgtaatcccagctactcaggaggctgaggcaggagaatcacttgagcccgggaagcggaggctgcagtgagccgagatcgtgccactgcactccagcctgggtgacagagtgagactccatctaaagaaaaagacaatctaccaccttttcccgagtttcctgagtaacacacctgacagctatgggaagcttcagcatatttcccttgttgctgaggtttctaagccagcctaaaactcgcatgtaattagctgtgtgcgttttataaaaacatttgccaacccaagacctgggtccaggcatgtcttcccccagtgtgtttggcttcctcacgatgccaggccctgcgtgcagaccagatgccacttgtgaggacgcaccggcaggcaggcccctccaatcctgagggcggcatcacggggacctgcagtcatggctgcaccctagtaccgcggggcccccctgcacccgaggcagggtcctgctgtcagcctggaccttggggtgagggaggcagtggtcctgttcagcagagggcatgggactgagcacagcccatcagggaggagagttagcagggccctgggccctggcggggagctgctgggggcctttgagccatagtgaagagtgtggattgtcctgaggtcatggcactttgatggtcaggtctttgttttgaacatatccctgtggctgtatttggtgactggaaataaggagagggcttgagggctcttgggagacgggagagggctgggggcctggaggtgtgcccgctggaggaaggtgggagttgccagggcattacagagggtctcagagctgtgttggcatcactccgcaggtggagggcacagctgagggcgacagtgtcgttgagtgcgaggaggttggggcctcagcttgcacgtgctggcctgcgaggaagcatcagccgtgctgacatggagatgtttcctctgcaaattggagtttcggacacacagactggaattgaactaacgggcaccccaggaagactgtggggcgagacgaggaggatggggggaccagccgtcgccccactctcctgttcatcatcacagcctcgttggggtgtaaacgacccccagtaagctggtgcatgttcaataggtacatttttgtaaatgttaacatctgtaaattcgtacctatcaccacaatcaagacgagaaaaggcccaggtttcccctttcccattcggggtccctcccctcccacacccccttcttcaggcacccctggtctgttgctctcactgcagctgtgtctgcatttcccaaagctctgtgtgaatgggttcaggcagtgggcactctcctcactcacactggcttcctctgctccatgcttcctgcagactgtccgcctgtggggaccgtcccccgagcctccagggccaggggtgtggtacgtggcgtctgtctccactcacctggtgaggggcttctgggcagtgtcttgtctgggttgtcacaggtgcagctgcggtgaacatgtgtgtacacatctgtctttgggcctgcactcttgttctctggcatagatgcccagagctgggtggctgtgctgtcagttttttttttttttttttttttttccttttgagacagagccttgctctgtcacccaggctggagtgtggtggcgcaatcgcggctccctgcagcctcgacctcttgagttcaagcgatcctcccacctcagcctcccgagtagctgggactacaggcacacgccaccacgcccggctaatttttgtatttttctgtggagatgacaaatcatgttgcccagggtggtcttgaacccctggtctcaagtgatccacctgccttggcctcccaaaatgctggccttgcaggtgtgagccaccacaccctgcctgtagctttttctgaaatggccacatggctttcggcgtgatggtgccacgcgcccccggtgctggatgagctcggggtccgggatctggggtccttgccggcgctgggggtgttggtctttcaagctcggggtccgggatctggggtccgtgctggtgctggggtgttggtctttcaagcttggccattgtcatgggggtgtgggagcagctgactaactcgtgttctagtgactgatgatgcagtttcagtcatcatccatttcaggggcgtgtttaacacatctttcgcccatttacttattaggttagtcgttttcttcctgttgagaatttgagaattcttcatgaattctgcatacaattcctttttcagatgcttccttgctacatatttcctcctgctccgtggctttccctttcagtatcctgtatattcctaagtcaaagcctttttaaaaaaaaatcagctttgggccgggtgcggtggctcacacctgtaatgccagcactttgggagacccaggcaggcagatcacgaggtcaagagatcgagaccatcctggccaacatggtgaaaccccgtctctaccaaaaatgcaaaaattagtcgggcatggtggcgcacccctgtaatcccagctactcgggaggctgaggcaggagaatcacttgatcccgggaggcggaggttacagtgagccgaaatcgcgccactgcactccagcctgggcagcagaatgagactccgtctcaaaaaaaaaaaaaaaaatcagctttatctttgtacatctactttattacatatagtttacatatagtaaaattgccagttttcaatatgggtttaagtgtggcagcgggtttggcagatgtgagctgttgaatgaccaccactgtggtcagtgtggtgcacatgaccctccctccaggaggcgccatcctgactgacctcctgtcgctggggctcccccgttttagaatccgtgcaggtagcttccttcatctgctgcctgcctcatcagctgcctgtgtttcagggttcctcagtggttctcactgtgtggacgccccacatttgaggggctttgagcccccgtgggttttgatgtgagcacacggcacagctctgttctccccggctggttttctgttggagtgagcattgagcccccgtgggttttggtgtgagcacacgtcacggctctgttctccccgatggttttctgtttttcatgagcattgagcccctgtgggttttggtgtgagcacacggcatggctctgggttttggtgtgagcacatggcatggctctgggttttggtgtgagcacacggcatggctctgttctccccggctggttttctggttttcgtgagcattgagcccccgtgggttttggtgggagcacacggcacggctctgggttttggtgggagcacacggcacggctctgggttttggtgggagcacacggcacggctctgggttttggtgggagcacacggcacggctctgggttttggtgggagcacacggcacggctctgggttttggtgggagcacacggcacggctctgggttttggtgggagcacacggcacggctctgggttttggtgggagcacacggctgcttcccacagctctgctgcagaccctggggcttgggccgttggacagctgagcagaggcttcgttttcttttcctatgtgcaggaggctgaacaccgcttcaagtggttgaagtgtgtgtgtattttctgtaaactttttgatgatatttctgctacactattttttttttattgattcagaagaactggtttattttagggaagcctcctgttggtaagatcagttgcggttgttttttcagatttgttgtttgacttttgactttgtttttggtgttttcctggtagactttgttcggcatatgtgttggtagggatcgatttcttctgtggctctgggtttcgagtcataattagaaaggcatatcctacttagagattattgtttaaaagtcttccgtgttgttttcacaagatgtaacttttatttttgagacataatttacacgctttcagctgcccctgtatggagtggacggttgtggaggggctgacagtgtgtccacctgcgtcacctgcatcttccttgggagtggagctcccaccacttccacggccaacactccttccccccagcctgtgtgctgctgccctgccctcgacgcggagcagggctgcccctcggggaaggtcgtatccatggaaccagagggaacacactcctgtgtgtcaggttctttgctcagcgtagtgcgcctggggaccgtccgcagcgcgtgtgtcctcagtgcatgtgtcctccgctagtgtcctcagcgtgtccgcagtgcgcgcgtcctcggctcgtgtcctcagcgcgtgtccgcagtgcgtcctcagcatgtgtcctcagcgcatgtcctcagcgcacgtgtcctcagcgtgcgtgtcctcagcgcgtgtgtcctcagtgcgtgtgtcctccgctcacgtgtcctcagcgcgcgcgtcctcagctcgtgtcctcagtgcgtgtccgcagtgcgtcctcagcgcacgtgtcctcagcacgcgtgtcctcagctgcttttcgttggtgagtctttgctcagcatcgtgcgcctggggcccgtcctcagcgtgtgtgtccgcagcgcgtgtgtctgcacctccttttggttggtgagttgtgtgcactgttctgtggctatacaatttttctgtgagtttgcctgacatttaggttattttgaatttttggctctgatgaataaagcagttgtatatatttatttagaaatcatcttcatgtggatgtgtattttcatttctttcagataaagagttagaatttttatatatttaactttatgagaaactgccaaactgttttgcaaagtggctgtataatcttgtactttcaccagaacgtatgcagcctctggttttcccacatctgtgccaacgcttggtatttaccagtcttttaaaatttacccattcgagtgggggtaacgatttaacaattagcattcctggctgaatactgatgttggacatcttttcatgtgtttattggccttttatttattttcttttgtgatgtttatgtacaaattttgtatcaattttttgtttggggtttatctttatatattctgttacaagtcggtttgccttttgattttcttaaaagtttttaacagctttgccgaggtataatgggcatatgttagctgtatatggagtgcagggctttactgaagtgcagctggcacacactaaccagagcgcacagcttcctgtgtgtgacggaggcctgagcacagccatcaccctggagcccccccatgtctgctccttgtaattcccgcctcggtcctcccccaccctgaggcccctgatctgcctctgtgggtgtagatgagttttttgcacgtccttgaattttgtgtgaatgaaacaaagctgtgtgcactcattttgtcagtcttctttggcttagggtagttgagattcagattgtgtgtgttgttgctgagtattcgattgtgtggatcaaccacggtttgttttccccgtggatgatgtcagggtggtttccagatttcgccgttacacatgaagctgtgtgcacgtttgtgtaaagcccgtgtgtgcacagatgctcttttcttttgggtaactgctcaggagggaatggctggatcacgtggtagatttgaagaaatgggcaaactggttttgaaagtaactgtgctgaattcccacccacaggcagtgagttctcgttcttccgcgtctcaccacctctccatgctgtcttttccagtgtgtttattgccggctttcctgagtacacgcagccaatgatagaccacctggttaccatgaagatcagccactgggatgggtaggttttctgtttttgtttttctaagagctttttttccccccaaaggagagattcagttgagcttataagccttgagtgtattttctcactgtggatgtcgtattttaaaataacttctgagaagtaatatgaattccagtcttcatgccggatgtgttgagtcatggtctgtctccagttccacttctggagcgcctggtccagtgtgtccgacgtggcggtgtacccgtgcaaatgtccacgctggcgtgttgtggagtgccgctgccgtccgagggggcgcgggcgtagcttggaggcggactctgcgttgtctccctcagcagtgcttcccgctgactctgctccatgtggctccacaggtggtttctgcgctgtctcctgggagcccagcagttcttagtggccgttttcatcattacagtagcagcttcagggtttccttgcatttcataggcagttaaatgtgtctcagaaaggaaaagtgaagtgcggtctggagcataaacagcgcgttagtgctgtgaccgccgccctgaggaggtcagagggtcccctcctaggacagtgccgtgctgtggcactcctcacggagcctcgaggagcggtaggtgcctgtgggtggaggtggctttgtgagggtgcgagtccagaatctcagtttcagagttggtgtgatgtggagggggtcctttctgatccatgggggatgcgtttgctgctgcctggggagcggcccggctgcctgccgtggtcctgctgcctggggagcggcccggctgcctactgtggtcctgctgcctactattggtcctgcttcctggggagcggcccggctacctgcggtggtcctgctgcctggggagcggcccagctgcctactgtggtcctgcttcctggggagcggcccggctacctgccgtggtcctgctgcctggggagcggcccggctgcctactgtggtccaggcagggccctcaggactgggagcctctgggaaaggaactcctgggtagcactcgggctgccgggggaagaccctcccttcattcgcttacagagaggggtgtgaattcctgagactcggggtgtccctgcaaatgttacaccaaaactctctccattaggtacaaggtcccctaaaccgaacctagggaaaattaattaatttgtcagttgtatcagccgattagtcaataacgtctttaaaaccaaagttacagatatatgcccgtagcgtcggagctgtgggactctccagctggtacatatgcccgtggcgtcggagctgtgggactctccagctgttgctgtctgtctctgcctcagttctgtcggcctttccttcacgtgttttgggcggggtcacttattggaggcagatacactttcgctttttgtctcttcctaatgtattgaccctttatctttgcggaacggccctcattgtctcgtgtgagatttcttgccttaaagtaactgatgactggtgtagtacctgagttggcaagccttttctttgaggggctggataaacgtggtagatctctgttccatacgctttgctttagtttattttatttagtttatgtaacccttgaaaaatgtgaaaaccattcttagctgagggccgtccttacgcgaagaggcctcgggctgggcttgcggctgcagactgcattgcctccgcttctcaggtgctttgtcttttctgttccctcagagttgcaggcgatggtcttctagacagcatgcagttgggtgtcgctcagggtgtggagtcctggcacatgagacgccacctgcctcgaagagctctttgtttaccgttagaagtggaccctgagcagggccctcggccgacaccagaggggctgtggcaggtggtcctgccagcgcgggcgtctgccattgtgcctggtttcactgtggtgctgtgggtttggtgtttttaaataattagaggacagacacccgccttctgcatgttttcaccttcacattttgcttctttgttgttacatggtcgccctcatgatgattttaagtcaggaccacttgctgctccagctgggtctggaggggctggggcatgagctctgcgggtcgctcccagcttgaccatctgcctctgcatggagctctggaaggaggggtgggctcaggaggggctccagcctcttgagccggtcctgggtcagcctttcgcggtccgcatgttcaaccatgggtgctttcagtgtgtgtctgatgaggcagttattggatatgtgccccagatttggtgggtgagcctcaggaaattccttctgttcaccccttgtaatcgtggaggggtggtttcacgtggctctatctcacactcacaacctcagagtagcgtgggggtggggaggccggacacccaattgccacctggccctgagaaggaaaggcagctgtgtcccaagaagaaccgtggttagccgtgtgacctcgctgttgtagactgtccttgtcgtctgttggagtcggaggttcttgtactggttcgtgtgagtgagtgagtgagcctctgctaagtggccggttgaggactcgtgtgttgtctccctcactttctttttatgaattgaataaagctagaatcataaaatgaaggcacttacgacattctctcctcactctcagggtcatccgagagttggctgcgagggcgctgcacaacctggcccagcaggcacccgagttcagcgccacgcaaggtgggtgtgtgtcccggccggcctgcgggcaccatgcatgcactgcagaaaggcctgggttgctggtttcaaaggctgggggctgaaaataaggttgtgcttctgtcttggtgagaagcatctgaggaaagagctgtggacttgatcagtggataggctgtgaggacggatgcggtgagtgtgtccgcctgcagggcagggagccgctgaactgtgttacgtacaccggagcccgtgatggtcccgccggatgcctgacatgcagtgctgcttccctggtctctaggtggctcgcacctgccacacgacactccctggtctctaggtggctcgcacctgccacacgacactccctggtctctaggtggctcgcacctgccacacgacactccctggtctctaggtggctcgcacctgccacacgacactccctggtctctaggtggctcgcacctgccacacgacactccctggtctctaggtggctcgcacctgccacacgacactccctggtctctaggtggctcgcacctgccacacgacactccctggtctctaggtggctcgcacctgccacacgacactccctggtctctaggtggctcgcacctgccacacgacactccctggtctctggttggcatgcacctgccacacgacactccttggtctctaggtggcttccatctgccacacgacactccctggtctctggttggcatgcacctgccacacgacactccttggtctctaggtggcttgcacctgccacatgacactccttggtctctaggtggcttccatctgccacacgacactccctggtctctaggtggcttgcacctgccacacgacactccttggtctctaggtggcttccatctgccacacgacgctccctggtctctaggtggcttgcacctgccacacgtgaatgcactttggaattgggcagcgtgtatagaaagaaaaggcctgaatgggagactcaaagtctgcccaggactaacatcaccttggaatggctcagctaagtctgcacttcttacacttcatcagtgaagagagaaatcctgtttgttctgtcttgtttttttctacttggaataaataatcatctgacttaaatgtggggaagaatacacacatttctcaatgtgtgtaccgtcactcccccgacatttattacaggggctacactggaggctggattgtggctcttcagtggagttactgatgtgacgcctgtgttgaacatcctgtgggggctcgttcattcctaagggatctttcagcttcgtgatctgttaatgaggcatccacgtcacgggtttagtgtggcgctcccctacttttcagtgataattaacccttgctgacactgagggggctcagctttgtcctccacccggttgaagagcacggacacccagaacaggactgtgaccttttgtagatttctctgattctcgaaaatccgatcacccccagccgccacatcttagcctctctgattctcaaaccatcgcaagcctggcagcacttggggaggcttaggctcggggagcttggtttccccacgcaggtgtggcagagccgcctccctctgcgtccgtgagggttctgaggagtctgtgctttctgagcaaactcagagtagaggcaccacccctgggggcagccctgcctctgtcctgctccgccccctccaccgcccaggcagccaggcagagctcctgccaggaccagaggccaccctacaccgacagggaaggcctggggagtgtgtcgtcctcctccatgctccctctcctgtctgagttacccaccccgtctggggcacttgggagcgggccatgtccagcacaccgcagcctccgtcctgttgcccttggtgtctcaggggccatctgcatcaccacgggtgccgtcctgggcactggggtgatgaccctgagggatgccagtgtgggcgggtgcgtgtgggcgtcccacaggtcgtccgtgtgtgcacgccgtcgcctgccctcccggccctgtgtgggtgcgtgtgggcttcccacaggtcgtccgtgtgtgcacgccgtcacctgccctcccggccctgtgtgggtgcgtgtgggcttcccacaggtcgtccgtgtgtgcacgccgtcgcctgccctcccggccctgtgtgggtgcgtgtgggcttcccacaggtcgtccgtgtgtgcacgccgtcgcctgccctcccggccctgtgtgggtgcgtgtgggcttcccacaggtcgtccgtgtgtgcacgccgtcgcctgccctcccggccctgtgtgggtgcgtgtgggcttcccacaggccgtccgtgtgtgcacgccgtcgcctgccctcccggccctgtgtgggtgcgtgtgggcttcccacaggccgtccacatgtacacaccctcacctgccctctcggccctgtctcttgcagtcttcccgaggctgctgtccatgacactgagtccagatcttcacatgaggcatgggtcgattctcgcctgcgcagaagttgcttacgccttgtacaaacttgcagcccaagagaacaggtaggaagagtgggtctcgaggagacacagggctctgtccctgatcccctcaccatgtaatcacagtgctctccagttcgagactctctcatcccttctcatttttgtttatctgcaccagtgtcacagtcgataggccccaggttgtattgatggagtgtgtaagtggccctctctcctgacggtcatgccgtgggtggaccacccacctcttcagcggggcgggtgcagcacccggatgggccgggcatctccccacggctgtcctgcccctgctgcctccttgtgcacctcctggtctcagaggtgacaagcgaggtcataacagcaaaggtcctttttccaagacggcattgagcgacttgcatgttcagtatcctttcttcatcacgttccatagtttaaaatgccagagaatatacacgtttcttttgaatttttcagttggctatgtttgtacaaataataataaagcatgaaaaacatggggtcactgggaagttgtgtgcaggaggctgtaaggcatcgactgtcgtcttacgtttcttcccagtcgagtcttcctcaagagtaagaactcccggacttaccatagtgacggcaacctgcttctcggactccagtttaagaaacgtttttaagttcatgccctgtgctggagacagttccctgggaacgggttgagagcagggtatgggcccacctcccgcccaagcctgaggaagctctggtcggccccgagctcagatgcagagtgcagctccttcagggacgctcgctcgtgtgggtgcagctgatgcccgtgcaagacctggcctttatggcgctgctctgtggttgtggaagaaggcacatggggtggggtctggggagaaccaggcgggagctcccagggtcctccagtcgggtcccacagggcctgtgtcattcccccagcagtgagatgtgaccacacctgtgaggtgtctatcagggaagcacatttgagcctcagtgcccaggctagactggggtctggccacgtgggcacctccgcctggcacgaaacaaaattccagacccccagcaggaaagcaggtgccagcgtaaagcacacggtttgcgcagattgagccagtgagggggcctcatgaggcagggcttggtccaggcccccgcatgccagcccaggtctgatctcgccagggaccttcccttggatgtcagtggacatgagctgtcgtctcagcctcacctggacctgtctgttttccaaggtggtcacattggcaggggtcacagctttaaggggatgccctaacatcctcttcctttgaccaggcactgcttcatctaaaatcacaaatgggccaggcatagtggctcacgcctgtaatcccagctatttaggaggcggaggtggggggattgttagggcccaggagtttgagaccagcctgggcaacatagtgagaccccatctctaaaataacaaaagaatgcaatgtaaaacaatacagtagaatacaaaaataatcggaggtatgtcctgcagaggtctctgggacccactgggacctgaacaagaatgagaccttgctgagcctatgctcctccgagtgtacttggggttagggtcttggggagtgtggcctcagctcctccgagtgtactcggggttagggtcttggggagtgtgacttcagctctgtgtttgaacttctgcaggcccgtcacggaccatctggacgagcaggcagtgcagggcctgaagcagattcaccagcaggtttgtgtgcagcctctgggtgtaccctcaggaggcatcacaggacctgcccccttagggcctcccaccctccccaggcagggtctgcagtcctggtggccactgtgctccatcagtcctgggctcagtgggggacctgcggtgtgatcactctgggaacaggctctctgctggcgtcatgcttgtgaacagccaccttggagggttgccctgggaggggaagagactcctaggaaatgagtgcagactttctgtgcacgtagccagcatgtccttggtctctgaggaaggcttatgaagctagtgcagtcggtggaggtttcggctgcagctggagtgtggtttccctccggggcgcgcggctgcggtcccacgatggagcgtgcagccaactctgggtgggggcattgggccccgtgctctcctggtggagttgggggcacacagaacgagcacagaagcctctggtttccagccgtgcatctgcagctggggtctgatgtctcctgaaagtaaagcagaattttgtgtgtgcgtctgtcggatttctctggggagacagtgtgttcatctttctgggctttgagagattctcaaaggcttctgtgacccagaggtaaagtatgaactatggatcttggtgttacaggagaatataaaaattgttcacgagggattacgtggtttacttgtctgttgtccagatagctttatattctttaagattcagctcggattcttatcctatttttgccattaactttcattatgattttggcaaagccattttgtttgcttacatttttcacttttaatgtggtgtctggcctccccctctgaccgagacaagcatggctgcagagtgcagacggggaggtggccccgggcagcagccatgaacgtggcctccccactgacgctgagccatggctcccttttttcagtaaaatataagcagtaatagagccgatctccttgagtttttgtgagaattaaagaatacattttaaagaattgaggagaatttttgggacagtgtgagcattcagtaaattttagttgtagtggccatcacaacgtggcttttaagctctcttacaaaaaaagaaacatcagcatcctgtttggcacagttacttttctgcacaagaggctgcctgggtgggttctacgtcggtctctggggccagaatgcaggtggctccagctccctactctggccctctcctccctctctctgtgcctcagtttccccttcaagggagctctgggcctgtctggaggttaaacaaggccatctgcgtcagtaggtgggcctccgtcctcagccccctaggcggctctcctggctggcatggcatcttctgccattttctctttgttcttgtttttgacagttgttaacgtatacgtattattttaaaatttaaatcattaaataactttcagttttttattttcagctctatgatcgtcagttatacaggtgagctttacaaaaccaaagttcttatatctgtgtcctaatgaagaactgcgctgtcaggagcaggcggggcgggtgtgttcgcttccctctctgcctatgtgtgtttgggttgagcgggtgggtgtcacccggcccgctgtgggaggcgcatgagggtctgacctggttgtgtgattgggttgagtgggtgtcacctggcccactgtgggaggtgcatgagggtctgacctggttgtgtgtttgggttgagcgggtgggtgtcacccggcccgctgtgggaggcgcatgagggtctgacctggttgtgtgattgggttgagtgggtgtcacccggcccgctgtgggaggcgcgtgagggtctgacctggttgtgtgattgggttgagcgggtgtcacccggcccgctgtgggaggcgcgtgaggttctgacctggttaggttttcagctctgcaggtgtcatcgcgtttcctcgttcccaggacttgctggtcataggcaggggtgtggcctccccaaccccgagatctggccgggtgcctccctgagggtttccctctgtgcctttgcagcccaggcagcctgtctgctctgacagattgctttgctttttctagaatttgctaccgagggtgtcacacagtaggaagcctttgggtgtggtttcttccccgacgtgtctttgagatacctgtgttgctgtgtgttccgtggtgtgcatgtacggcgccgtgttatccactcaccagcccaggctcatctgggtttccagcctttggctattgtagggaagctgctgtgcacatctagacgtacaagtcttggtacgtttcacgtttcctggctgactaccaggagcagcatcgcagggtgtggggcacatgtgtgacttctcagcagccgagccaacttcccagaccctgctgctgcacgtccccatccacaagtgaccccttggtgtggtcggctctgaacgtgggccctctgggtgagtagaggcctctcgctgctgctggagtctgcctctccccagggctcctggtgctgagcctctttccctgtgctgacgaagcattcctgggtctttcgtgaagttttttgctcattaaaaagttcagactttttgctcattaaaaattttatcgtctgtcttattgagctgttagaactcttcatatattccagatgccagctctttgtcacacacaggatctgccagtgctttctccagctctgtggttcacttttcttttctcttagtgactttttttttttggagaagcagtctcactctgtcgcccaggctggagtgcagtggcagcatgtcggctcactgcaagctcacctcccacgttcaagcgactctcctgtctcagcctcccgggtagctgggactacaggtgccccccatcatgcccacctaatttttgtatttttaggagagacggggtttcaccatgttggccaggctggtcttgcactcctgacctgaagcgatccgcccgcctcggccttccacagtgctgggattacaggctgagccaccgcgcccagcctcctagtggctttttactgggacttgtgtggggtagtgaacctcgtgctgttctcctttaccttcgaggggtgaagcctccctttctgcctcctagtccttccaggctgctcccaagaggtcccttggctgctcccaccagtttctggccacctcctcagtcagcagggcgggtggccctgtttgggctccaccccacacactgggcctggagggctccttcaggtgctccttggggtactggaggacccctgccttgggcctcagtcctgtactcttcacctcctggtgttggagccagcatttcatatgttgcattctgtccagttttctacttgcaggaggggacatccaaccctgccactctgtgtgggccagaaaccagggtctcaggagtgaatattttgccctccccagggcagcgcgcctgcccttgtgcaccagggtcccgctgtcagcgccagggctggggcaggtgtcccagatgggcagagcagcccggagctccgcctagcttcgctcatggtagaaccgcagtgcactgcttctctaggctggatagggggctctttctggcatctgagattagtttctataaagtaagagctgagcgctgcttggaattagttctgtgatgggataccagtcaggactagaatgtccagtaaaaattaaaaatcagcatcaccccagctaggatgggagacctctggaagatggctgtaccacgttttttcctttcttttcataaaaggttgctcatgctcagtaacacattcaactagttctcattttaatgctttttggagcctgaggttacattggcaagcatatttcatggtgttttatacgtcaagaggttcttctaattctgatgttttcattccttttcaggggtctgggaggacagctcatgagacaagcaggtaagtctgaaggcctttgcagccctctgcagccctttgccgcagccatcgttgagggaggtgtgctcgtggcgtgcagggcggcccattagcccccagggtgaagggctgggtgtgtttcttctgtggaggcggcatctgtgatgtgcttggtttgtccagtggttcctacgagggagagattgagagattgagattgagagagagaaagaggaagttgtgagctgggaggggttgcacccaggagccactggttctggaaatttctcaggaagcagaggcagctggggcagtggggccagtgcttgcctgtggacccagtggacattgcagatccctccgagcacggccccagcgtggacagagcagccctggtcgtgccctgtggactgagcagcgcagggaccaagagccgttttgggcgagcacaggaagctcaggcgggggcaagaggaaagctgagcagaggcgaagctccttacacacccgagtccaggcgaacctctgcgcctgattcccaagcctctgataccccccgggggttaggacagtcgggcattttttctttgctgattcttttttagcatgtgaggaggagggaagcgtagaacacattttagactgttccacagagtattaaaggaaaagcctgatttcatagacattcctgatggcagcagccgaccccaaggtccagggagctggattccccgacacagctcctggggccctgctgttgtggacagcccatcccacgccaccctcagcccctcgctgtgggactgtgagtgtgagtgtggaggcacagctggtgaggaagcttggaaaaatcgcggttgtgtgcagacttttgctgaggtctgcgtggtctgagcagaggagagcaggctgggattcggggaacccacggccggatgtcagggctgtaccagcctcttgtgctttctgtccacacctcccagccctgacctgatagggacctgcccgaggcctgcagccatctatctccagccaggctggccgggcttctgtactgagagcagccagcttgcatttctgctggtgttagctcagtgttctcatgagtctgatggacgtcacgggaaagtcaatcctagaaacgtgagccagtttctgtcagctgacgtcagaggcatgggactgccagttctgcaggtggtccctgttggctaagaccggtgtgtcatgttttggatgtagacttggtcattgtccctcagatgcctccagagcacacggtgcaggggtgtcacctttccgacgtacccatgggtgcccggagttgcctccttagtgggatcaagaccatcccccacatgtcatggacagctggtgacctgtaagccgtttctggatctaggagtttggcttgggatggagtggggtgtcgagtgctctcagaagggttcaatgtcccccacttcccacccacgacacgggtcgtgccctggagatggcagttggaggcagtcctacgaccttcacacgaccttcacgtgctccccgtgtgctgcggggtctgcttttagggtcgctcttggtgtttgagcagtaagtctgcacaggagccactgcccaccatgaaaggggggagttaaaggcgttccgaatccctttggccaacgacggagttgaaggtgttccgagtccccgtggccggcggcgacagagttgaaggcgtttggagtccccgtggctggcggtgatggagttgaaggcgttccgaatccccgtggccggtggtgacggagttgaaggcgttccgagtccctgtagctggcggcgatggagttgaatgcgttccgagtccccaggacgccattttggctgaatttcctttaccctcctgctccgtgaagcggggcccattggggaggtgctgctctgtaatctgctcttcttcttgaatgtgtggttagggcagccacattgatgtcccccaggctccagagtgaccgccccttaggggtcctgctgggcgttggccgctgttggccgcagggcaccgttggcctgtgcattgctgccacctacccatgatgggcagaattgtcacgagctcaggaggaaaccatggaaaaaccgcaggtcctggagcctccgtgtggttgtcgtgggcagctttccacgcgacgtgccctccctgggcgtgaggctgcatttgcacttagcggggagagggggaatgttgtgggttctagttgggctttttgatgatgatatttggaaagacttgagacaaagtagccaccctgtcctgtcccttcctcacccaccacacccactgctccccgctggcaggcactgcaggctgcacaagtaaccgtggaacctaaacactgatgtgcttcgtccgggttttaaaaaggcgcccttaccgcggtttcggtgtttggcgtcttcacgccatccgggttctcggtgctctgctctgaaggatggtggagggctgtggtctgttgttgggggtgctgggtgcagggtggtttctgtctgcctctctctacccccaactccagctttcccaccctgccctctgctctggggcacgtgtgctgttgggatgcatccctcagggttcacggcagggtgtggattgctggggggcatcgtggagaagggcatctttatgggaggcatccctgctctgggccccctgccggcctccagctgtgtctgcaccatgagtgtgtttgctggagtgcggtgtttgcactccctcacaccgctgagtgcaaacgcggcactcctgcacatgtcgcctcgcaccgtggcgggcgtgtcccgtggaaagctgcccatgctgcccacgccctccctgggggccccttggctgcctgcactccccagccgtgacctcagctcccggcgccggccctccttgtgcagctccttcccctccatggcctttgctggccccaggagactctggcctgcaggctctgaagccggctgtgtccctggtgatcctgactgagccttggtgtcaactcaggtttttttctcctcctcgttcatttttacacttcgtaggaaattattttccctttcagctttcaagtaggaatagttcagaaggggaaatagttctgcatagcgtctgtggtcttggccccgcatctcccagtcccacatttttatttttccaaaggcaaccctttcagttttttagctgtctgttttccttgcttctgtatttctgagttctgtatgtacgcagctgtttcctgatatccttagttttagatgtgttctttcaagtgagacaagactccaagctcttgtcggggtgagaaatctgcgggttcacgggctacatgtgggagacggggaggggctgctggtcactttctcacccaggccagaggatggcgcccttacccccgaggacgccggcatgtcggtgacatgccgcccgcaggagcatcaggtgcgccctggccgcaggtgccccggaggtgtcgaaccgcagatttcttcagacgttttttgcacattttgtgggaaaagtggctcaacccttgggagtcgtctgcgtccccatatcaaagaaatgtcatacaggttggcctttgtcgtgaatattcacgagaggagatgaacatcctggatgtcctcagcgtggcctgaactgagctgcttcccccggtgccaggaagatgagcgtccccttgtctccgtcttagtctcagtggctcttgcatttcatgctttagaatcaaaggaaagaaacaggaactctgtttagtgaagcagcgatgaaggaggggtttgtcagtcagggtggactgcgttttgctcttgaaacaatccccaagtttcagtgtcttaaaaccacaggtgtttttttatcctgctcacatgtggatcaccgagggcaggggccgggaggaagggggtcatctggctcacagccttgcaccagaggcgtcacgagaatcaggaaaagttctcctctcatgccgaagacgggagggaaaccagagggactggtgagccttgagtcggccacaggtgtgtggaggatcgtgacttagcaagccggggacacgctgttaatggacttcctgctgtgggggtgagggctccgtgctccatctctgatgccctgtacacacctgccacctcccctgtcccctcagcagagacatggccggtgctgtcgtgcctttcgcttttacctgtatcttaaatcacacaggagttcattcggatttacctgtacagataccctgttctctttcttgttccgtgggaattcactgggatttacccacacagccacctgctgcttctccttcttgttctgtcctgcatttctcaccttctaagaggaccattttctctttgcctggagaacactctagtgttttccatagtgtgtgtctgctggtggcaccctctcgtttgtttataccaaaatggctttttccactttttttttttgagacggagtctcattcactcttgttgctcaggctggagtcacagtggcgcgatctcggctcactgcagcctccatctcccaggttcaagtgtttctcccgcctcagcctcccgagtagctgggattacaggcatgcgccaccgtggcaggctaatttttgtatttttagtggagatggggttccaccatgtgggccaggctggtcttgaactcctgacctcaggtgatccacccacctcggcctcccaaaggtgctgtttttttttttttccccactttgattcttaaaggttatttttgctaagaatgaaactttagtttgcatttattcattcgtttgtgttttggcactttaaagataatagtctcttgtcttctggagaggttagctgccagtctacttattactgtattggagacaatcttttaagtttcgctggcttcttttgagatttttatctttatttggttttcagcacttttaccgtgatattcctagaacaagttccctttgtgtttatctgacttggggctctagggttcatacttgttccataatctgtattttctgtcgatgttttgttcactttagaaaaattcctagccatgatctctttgaacattgctcactggcctctcctctccttttgggactcttattacccacgtcttgtctggatcaccgcacttaattctttacgcctccttacactccctcctctggttttgtcttattcagtttggacttttttttttcttttcttttcttttttttttttttgagttggagtcttgctctgtcaccaggctggagtgcggtggcacaatctcagctcactgcaacctccgcctcccgggattaagcgattttcctgcttcagcctcctgagtagctgggactacaggcatgcgccaccacacccagctaatttttgtattttttgtagagatggggtttcaccacgttggccaggctggtctcgatctcttgaccttgtgatctgctcaccttggcctcccaaagtgctgggattacaggaacattttctttgatttaaatttcattgtcacaaattctttcaggtgtgccttatctgccgttaaacgcatccttgaatttttttatttttcagaacttattttttatagttttcatttttttcacatcctggaacatattaagcatggtttaaaatctttgtttaatgtcatcatctggagcctctgtggctgtttctgaaggacggtatatcatacatgaaaagcatctccaccaagctgcaggaacaagacatgacagaaatgctttgaggtctgcaatgttctcctctcccagagagacttgatgttggctcttgacgggaggcgggtgcttgctgtcggggtcacctccattgggttttgggacgtaggaggggtccgtgctgggctggcccacgttttacacctatttctaggtgtggtcctctgggttcagagcctgtggtgagggctctaccgcttctccctttggtcatcctggactcccgttctcctgctagctggagatgctcctggatgcactgttgggggtttctggttcttgtggcgccccctggagtcagccgtgagccggggagagttggcccccgccgctctgtccctctcaggtcttcgtgagctctctggtaactgcaggcacttcctgtgtgttttcattttgtctggcttttaaaaatgtcttagtggagggttggtctgcgttatctagtctgttagtttttaaaaaatattcttcatttcgaaataattatagacttacaggaagttatgagattagtaatagagcctggctgtgcttcccatgcttcctccgcggtgactccgggtatgacagtgttggagccgggactgcggtgtcgaggccctgcctctaactggactgcaggcctgtgcggtttcgtggcttcatgtgtgtgtggagtggccatgtgtgtctagtttcgtgcagattgatgccctgtgtagatttctgtaactaactccacactcaaatcagaaacctgcatccttcccacagagacagcccctgccctttgcattctcaccctgcccccctgccaccagtctgtcccttctagaatatgccatgatcgactcgtatggtcgtggcatttcgaggtgggcattttctgtgagcgtggtgccgagaccccatccagctgtccatgtgttcacagtttgtgccttcctagcccacggttgggttttaccagagtgtgttcgaccagcactcagtagagtacactggggctatttctatctgttgctgttgtgaacaaggttgccaggaatattcctgtgcgagatgtgggtacaagccttttcatgtctaccactgagtcccgtgtgccgtttcgtgagaggctgaggcaccgcttcattccaccgctgagccccgcgtgccgtttcgtgagaggctgaggcaccgctgagccgcgcgtgccgtttttaacttgattataaaatacatttaaagttcacatgcaggtgcatctccaagaaaattattttaaaaactagttaagactttcatttcccagtcctcaacacacatcagagcagtactctgttcagagctgaaaggattcgcgctgggacaaaggcgtgtcacttgagtgagtgatggtgtcacaggtgcccacgtggaagaaggtaaagtcgtatctaaaactaaatgtgagagtaactaataacttacgcataaaaactaccatcataaaaatcctcgaagaaattttaggagacgttgtaggacagtgtcagtctctgaagaaaacttcttagtttagaaattttcaaatctgcgcagaagtaaagagaagtagtttacggggggggcccagagtctcgcccggcgcttcctttctcctcccctcctctgagtttaaagaagaccctgaatgtcaggtcccagcagcccctcgctgggtttttctaacttgtggtaagaactggttttctggggttttttgtttctttttgtttcccccctcttggcatgtaatccccagctaacagattttatcataataattccacaaggtagaaacaaaaggagataattatgttgggccttatattgaagaatagaccatgtgtaggttggtagggaaaacggagattgagaataaacgtctgttctacagtcgaaaaggtaaaaagttaattagtgtacaaagactaaattgtaaaactgcctgtgacgaggtaaaggatccagtatgaaatggggcagagcagacgtgtgggcatttcatgcagaagaggagcagactcacgtggccgtggacggtgagggtgccggcctcacctcggaggcatggaagtaccaggttacttcacatcgagaggaccgttttcctctttccagtcggctgcggttggcactgaagaatcttggtgctgacagacacagagcagggtctctcgtggaacaggagttgtctggtctgttcagtttgatgagtggcagtatctgtgacgatgggaagtgtgtgtgtggtccctgtcctgtgtgcagggacgccaggtggaccgacggcctccgcatctgtagcacggtcaggcctccttgttcacggtgacaaaaaatggaaggagagtttagtccctcaggagaaatagcaaataccatgaacaagtgtgcagcaggcgtctgcgagtgggttccgttgttaggtagagacggtgggagctagagcagtgtgtggccgtgggagctgctgatgctgtccagtcgtctctgtctcgtgcgtcctggccccctcgtggctggtcagggccacgtttctggtcatggagagtgtgagtgacgagctatgtggggaagtgacaggcatgacctgtggtctggagcattgcaggtgatggctgtctgtcgcttgggtcctgagtgacaggtctaggagcagaagccgctatgcttcccgtacagcctgtcacagggacgtctgcagctccctgacaggccggcccggcttctctgaagtgcacgtgggctcacacatgggccttctgccacgtggctgggtctgcagcactttcttcaggctgctcagcggaggaggcgtcttgggcttctcatggtggttctgaaatggttctgggatgtttccagccctggcagcagggtaggttgggcgggtgaggggcaggagctggccgcacacaactcagaatgtggcaaaggcaagccgctgtggcaggcgcttttagaaaagtaacattgcgtctatcctttttttttttttttccagtgtgtgttttaatagaaaagttgtcactttccaaaatgccctttagaggtgacaccgtaattggtaagtgcttttgtttttaataatagcattttcttacagaatgacttcagattaaaaggtaaaaatgaacctgttaggatgggggcgataaacgattatagcttaaaggttcaagatattaatcggatacgttgccttgaagttgttacaagaacctgcttaaataatgggtacccaccgccctctccccccaacacaggagggcccttccccgccgtcacctcagtacccccacctcctcgcttccatgcccagggcccggcactctgggtcagttcttctcccaggcagacagtcgggagctgcagccacccaggccctcgtggaccaggagcgtgccggccgccgacaccacggaccctgtgggcagaggcggctccagttcctcagcagccccccacactgggctgccagagcacagtgaagggagcccccagggctgtggtgtcccggggctgtctcagcagcctcagaagttaggactttttttttgttaattgaatagccttcacatttgttgcttgtgcaggatctaattgagttaaagatttgggtttatattggtgggagccgggggagaccgtttgaaggaaaagatttaggggtaacaaaagaataaaagtttcccaaaatgtgatgtataaaaatttacagaatgctggtatttccctcaataagagcttacacaatttaacagccatgagaggaaggggccttagacttaacacaacgtggagaatgttcactttggcttttccacagattcctctcaaaggttaccatcgactttaagattagtattaatagaagctgtttttgctgttgtttttgatttcatggtgtttttgattgcctgggtacgctaacttgattttttgacagatggttggcaatggctgataaatgacactttgagacatctccatctcatctcaagtcactcccgccagcagatgaaggtacagtgagcatgggcgttcccggccggcgctgtggcggtgttagtgtgttagtcacggatggtgtttgtgttggcgactgtgcatcatgaggctgtccctgcagtagcctgataactgacaaatgggggcataattctatttggaatcccggatggtagcgtctacacggtttataaccagaaaatccaatacagccattggaatccgaatgtttaattttttattgcttctggctgttttaattatagttacctttgaaatactttttctgcatcaatagtaactgtgctctgttgagttccgtgtcctgtaggatctgaggtttggaaactccctttatgatgctcctgtgcagatgagaaaacagcaccccaggacctctgctcgcacacattgacctggtcatgttgtgtgggtgccagtgtgtgtgtgtgtccccggccacctgccctcccctcccgtcctgggggttacaggtggactttggactcacagagctgtaacgctgatctcattgcatagataagaaaccatgggcccggcgcagtggcgggtggatcacttgaggtcaggagttcgaggccagcctggccaacatggtgaaaccccatctctactaaaaatacaaaaattagcggggcgaggtggcgcgtgcctgtaatcccagctactcaagaggctgaggcaggagaattgcttgaacttgggaggcgaaggttgcagtgaaccgagatcacgccattgcactccagcctgggtgacaagagcaagaccctgcctcaaaaacaaaaacaaaaacaaaaacaaaaaaaaccatggttaccaacgttgactaggttttgatattgaggatgaagaatggaagtacatttaggtgtcttgtaattctctgacttcctccatgcttagcatttctttttccttagcatcttcaattttcttattttttttttcttaaggaacttgaacattctgtaggatccaagtaccgttctactaattgaatttgaatgcatcatgatcagtgcctcaaaattttatttcaaaagtccatgattaattcacactggccatgatgctggtgcactttgcccctgggattggcacaggtggtgactcgtggaatgcagcaccctgtagacgacgcacctcctctgctcatggcccccacctgccccgcccccagtgcctctccaaggctgctctgttggcctcggctcctgggcttcgggggagcggtggaaagaacacgtgggtttggtgtttgccacttgctggctgtgtggtcacgagaggctcctccgtaggtggcagaggtgggggttcgaggagacagtggcactgagccccgcacgcggcgggactggtgactctctgcccgctcctgctctgtgcagcaattgccgtccctcccaccacggttcctggtggccttgggatgggttcccgggggtctcctgctgtccggccccaactcctgttcccagtgcgcccccggagccctgtctctctaaatgaggctgacgtggcttggcctgaaggccctgccccgttactctgggtgcatagtgtatgcctttttcttcataactatttctgggaaagaaaaatatgctccattttattattgttccatattagaagacagacattgtggaaggaataatcaggttatccattcagtttcttagttgtagtggtagtaaagtgatgcgtgtatctgacagatgatggtgagcaggcgtgctggaaaggagtagcatgacttaggggttcttttggtttggttcgaaagtcattgctgtgccgagatctcagggtgacccgctgtgtccctggtcaggtccttctctgacctcaagggtgacctgctgtgtccttggccgggtgcttctccaacctcagggcgacccgctgggtccctggtcaggcaggggctgctctgacctcagggtgaccacggtgtccctggtcaggtgcttctccgacttcagagtgacctgctctgtccctggccgggggcttctccgagcagagctgctgtgcgctcaccgtgctgcctttgttttaggatgcagcagtctcggccctggctgctctatgcagtgaatattacatgaaggagccgggggaggcagatcccgcaattcagggtgagtggggagcccttttcttgaagactccaggggcttccagcaggaagctgctggggagtgtctgggcacggaggaggcctcggttgtgcagtggagcagagccaccacgatcatggctggagtgggactgttcgggtctcaggttcccagccgaggagctgtgggcaggtcctgcagctgcccaggatgttgcatcagctctgaacaggtggctcagcagggacgcgtctctgttgacggcaccctcttgctccatcacccaggctggagtggtgtggcgtgattcggctcactgcaacctctgcctcctgagttcaagcaattcttgtgcctcagcctcctgagtaggtgggactacaggtgcctgccaccatacccggctaatttttgtatttttagtagagacggggttttactgcattggccaggctggaatcgaactcctgacctcaggtgatccacctgcctcagcctcccaaagttctgggattacaggtgtgagccactgcactcggtcagtgtttttagaatttttgtatgcaccgtgacatttttctgctgtgtgtttcactcgttaatacattttgctgttttttccttctttatgaaagtagcattaggctggctttacgccgtgtcccgtgcgtagctgctgtgccgcctcactgtacatcctgcacccccgtgctgaagttcaggcttgcttctcgcacatcatgttcgagggatctgcttcatgaatcgtacttttatttttaaagtgtcacatgcacatatgttggcccacagtgttcctttatgtcatatgatagaacatgcattattaatcacgtcaaaagtgtgtgaatcaccacttaaaattattataagtatataaaaatcatgcattagcttggcatggtggcacacacctgtaatcccagctacttgggaggctgagtgtggggttgaggctgcagcgagctaagcttgcaccacggcactccagcctgggtgacagaatgagactctctcaaaaaaaaaattctctttctgattcctattttgaggtaggccactttggaaacgtgtctgctttgggaacctcaggcggctcctcctttgttcactgtggctttgctcctgtttggggcacacgtcgggtgtggctgtacacgatgggcagcagagggcctctcttcacactcgttgcttcctttcagaggagctgatcacgcagtacctggctgagcttcggaaccccgaggagatgactcgctgtggcttctcgttggccttgggcgcccttccaggcttccttctgaaaggccggctccagcaggtgaggctggccacgcgcagtggacggggcctagggcgagggtgtgggagcctcgtgtgttggggcatgaggtaggcccagccgttaataaacccatcagtgcttgtagctgggagggggttcctggaaaccggcacctgtggccaggaggaagggggcagagggcacccaaggtctgtggccccttagggccctggcgaaccctttgctgtcagaggacagacttgaaaaagctgaattctgggagggaggagaaggtgttgtttgtagaagcagctgccgagagtgaggagaacacagttgcctttgtgcgttgtggagccgggtcctgttttggttgcggccgtgcatcctgcatccaggtcggggcagaggtggttccacgtcctcccagaggtcagccccacgctggcctcagtgacctgctctctcacgctttcctgtggtgctggtcccactgaccaacctgccgggaactcctgcttgtctcccctccggccacctggcgtctgaagctggaataggccctggccactgggttccccacgcccttccctccccatgggatccagccttggcacttcaggatctgcagctccagacggactcctgcctgtgtggcgggtgggcctcgcagccgccatgccatctaaaactcgcatgtgggggtttatccagttgaaacacagataaatgtgaaacaggatcacttggagatatgacagatgaggttgtcgggacccagcagcttcctttgtcaataccccaggtctcagcgtaggacaaaagggggggacctcaggtagggtgtggccagacccccagtgacaccctggggtgggggctggccgtggagaggctggaggtgacctctccccgggtgtccttcctgggttgtactgggggccgtggagaggctggaggtgacctctccccgggtgtccttcctgggttgtactgggggccgtggagaggctggaggtgacctctccccgggtgtccttcctgggttgtactgggggccgtggagaggctggaggtgacctctccccgggtgtccttcctgggttgtaccgggggccgtggagaggctggaggtgactcctccccgggtgtccttcctgggttgtactgggggccgtggagaggctggaggtgacctctccccgggtgtccttcctgggttgtaccaggggccatggatggccgtgaggaaggtggtgccaggagctgcctatctcatggtgtggggtctgtggctccgggccaacattgccacctccctaaagagtgcactttgttatagcttatggttcttctgtgattctttattgctttccaggttctcacaggtttaagagcagttacccacacttcccccgaggacgtaagttttgctgagtccaggagagacggcttgaaggccattgcgaggtgagtcccaacagttcctccctaaagtcgtaagtctctgaaaggccagcagatgaacgctaagggggatgtttttgctcagaggcaggacttatgattcttcacttcctaggtttcctctcttccagaggatcgtcagtcccagctgctggaggctctttcattctcttgctgtcatagtcgtagtgaatgttaaacttctttagggacactgggccccttggagaattggagaatgtgtcctggcccaaggttggcaaagaggagctgaccctgccagccagtgtttggaatgatctctgcactcgttgacagacacgcacctggggccacgccatatgccctctcctccctgcaggcacacaagaggagcagtcccgcgggggccacgcacgcccccttctctcctatgccagcatccgttccctctagtcagggtgggaagtgggagggaccagccgcagggggcgtccccatccacctttcaaccggagagacggcagagcgtgacctcggggaagcacgtcccacgttccatacatgtggaaggagctctgtgtttctgatctacccgagggtcctggactgttctgagcgtgtcttctcaggatcaggaacacacatcagccctctgcgatgtggaagatgaggctcaccgatgtttgtttgttagctcacacattttaaatttcaggatttgccagactgttggtgtgaaagcaggagccccagacgaagctgtgtgcggagagaatgtttcccagatttactgtgcgctgctgggctgcatggacgactacaccacggacagcagaggggacgtgggcacctggtacgtacgtagcagtgggtgagcgcttcttctgagaagcccatctattccgtggaaactcggaggccccgggcttttctgcagggagaaatctttgtagatttgtgccgtgttttgcgttttaaaggctctggggaagatgacctgttctctgctcccgggtgagcctgcgtggcagggctttgcaggtgcttgtccagcccgtcctcaggtgttgggcctgtgtcgtcctcgttgacagggtgtgagggaggacgcgtcttcaatgaaaggctgccggctgcttacattgggttttgccaacatttcttgctgtagtgggattgataacccctgaaacgcctgtgtgtgtaggatgcctcggggccccggtgtgtgtggctgtgggtggctccctgcacacgtccctgtagcgcacagggaacctctgcaggccccgtgactccctggcagcgtgcctgggctctgtgtggggttagtcacgggtgtcgaattcacacaggctgccggcgtggtgggcagaaccagggttggaacccccctctcaagctgggtgtctctgcctctccttgtcccatcagggtccgcaaggccgccatgaccagtctgatggatctgacacttctgctggctcggagccagcctgagctgatcgaggcccatacgtgagtgtcacgtcgcagctcttctgcatcctagagggcagccccgagcttggggaggctggcggggcgggcggtcctggtgctcagtggcatttgcactgctgggcacacaccctcctcccagagagcctctctggtccctgaccccaggtttgtgcaggcccctcctcctgcccccatagccatggcgtgagctggggcccatcctcctctgcccagtgcccccaggacgaggctctgctccccagcctgggcctccaacggtgctctggccagtttgatgacagccagcttcccggggtagggccgggcaggaggtggggacttctcagcttaggaccctgaacctgggggtctgctcctgccaggaccagctgagccatcactcagttccctgcacctgaggctgccattggggcctgcccttgctgtgtgtctctgtcgggggcacggggttgtgggtacccccaggccctgccctttctgtcggtctctctgtcgggggcactgagtcatggaggtccaggccctgcccttgcggatctctgtcaggggcactcagtcagggggtccaggccctgcccttgcgggtctctgtcgggggcactgagtcatgggggtccaggccctgcccttgctgtcagtctctctgtcagggacactcggccgtggggatcccagggcctgatttccttagttctcacctctttctctttccccctccccatctcttccccagccccagcttctctctccccatccccggcctctctgtccccatcactcttctccacccgctcctgtaatcctatttgttgtccctgcttcaaccctaagacctcatcagcacgcatgtaacacgtagcacatgtgtaacaagtacgtagcatgtatttgctgcgcacctgtagggttgggctcctgggatgtgaaggtaacggagtgtggttcttccgagccagtgtcctggtgtcagctgccaactcagccaccatgtcccgaggagcccgcatgtcctcgtggtgcttgggctggagtcacggctcggaccgcctgtgctcagtttaccgcccgctcttaatttaccgcccgcccttggtttacctcctgctctcggtttgcagctgtgagcgcatcatgtgctgtgtggcccagcaggccagtgagaagattgaccgtttccgtgctcacgccgccagcgtgttcctgacgctcctgcactttgacagccctcccatcccccacgtgccccaccgaggagaactggaaaagctgtttcccaggtactgtcggggtgtaggccccccgtgctggccccgcagccatggcgagatcattggcagcccggccttgtctcactcactctcttgcaggtccgatgtggcctccgtgaactggagtgcaccttcccaggccttcccacgcatcacccagctccttgggctgcccacctaccgctaccacgtcctgctggggctagtcgtgtccctgggcggcttgacggagtcgacggtgaggaggcgtcgggctggctggggcaggaggtggctccaggagtgcctggtgcttccctgtctcttgggagcatgtatggagctgggccttttcttccattgctttctatctctctcgggcatatttggttagggggtcaggggcccagtgtcttcctcatgacccaggaggcttagggcctgtgggatggttgagtctgatgaaggtgggacagggccagcgccactctcttcctgcggccgcagccttggagctcccagcgtcccctcggggttcaatcctccaggacctgtgtctgatgcctgcatgtgggtacctgggctccatcaggttctagatcggcctccgccctccactttcagggctccaggcccagcttctcatgtctgtggggagggtctccagagccttggtctgtggctgagctgtggaacttgaaggcctctctgcatcttgtcactcgtggcccctgcaccttgggtcatgacctgctttatgtggcaaccctgtgacagctgctaagtcctagaaaacacgtaacaggacgtgaggtgccctctgcgccgtgtgggcgcgtgcggggagacccgggccccaggacgtgaggtgccctctgcgccgtgcgggcgcgtgcggggagacccgggccacatgcgagcggggccccgagacattctgcactcgggaattgcggggattatcaaatcccgcttcagtgggaaacgtgagcgaaacccaaggtgagtggccgcagcctttcgtcacgtgctctcccgcatgtcctaagtgagggctcaggctgagctgccgttgccgagagccttgtgtctgcttcgggtgtctgcactgtgagtggctccgtgctggcgtccgcaccagccgcttggggccagaccttcgcgtctctgcagctcggagcagttctgctcttcagcagatgcttgaccggctgtagccaagcctgaggggtggcaggctcgggggtcccactgccttctgaggtgtctccgtgttgcagatccggcactccacccagagcctctttgagtacatgaagggcattcagagcgacccgcaggccctgggcagcttcagcgggacccttctgcagatctttgaggacaaccttctgaatgagaggtgagtggtgtctcttggggcctcagaggcgtgagtggtgctggtgcctctcaccacgttcccacagattcccggggtctcgcagggtctgtctggggtctgaagggagaagcgagacacacgctgtaccagttggtggctcagcgaggaagatgtgcctgcagcatatggttctccgggcggccaggcctcagcccctgcgcctcctcttctagcctccacatgaggcagggaaatgaccgttgtgtgtacaatggacgtaaaggtagtatgagtacaaggtggtccctgtgtgtaggaaggcgttgtgggagctcctccagcttggtgctcccacggacgtgcttgcggacgctcatcagccacccggcaagtgagagctctgtgttcctgaggatggaatgtcaagtgagaaacatcgctgctttctagaagtttctggctttacatggaggcagagtatagaccctgtgggccttgacctcagaattgggaacatcctctggaagggttgttcccagcatgtgcgaggacgaggacacgggcctggtgtcccctcgggcggggcctcggcagcctctcccatgagagcacagatgccgctctcggcaaacaggaactcggcccagccatgttttcttttctcgttacgactataatcagctgcacataaaggggcagttcgatcgattttgataggtgtccacccttaaaatcttccccagtcaggacggtgggctccagcccaaggtttcctcccagcccttcgagtccgtgcccctgacctgcgtcaccatagcctcagcccatggtcacttgaggcgctgggccgcgtgccggtcgctcattcctccgtgccggtcgctcattccgccttgccgttcgctcattcctccttgctgaccagtcgtgtctgttggtggaggcaccacagtgcatctgtctgtgggcattttggttgttgccgcatcggggctgttgctggtagagctgcaggcagtctgtgtgtgcgagcctgtgggtaggtgtgcacagctgggcctccctctctgtgggctgcggagcccagctctcctgtgtgttagtcggcctgtgctaaagctctcctgatgctcctgtcgcccagaggggacctccccagcctccttttctgtggggtaaataccgaggcgccgcaggctggctcacacagaggcgaatgtctagctttggaaagctgctggagggtttccagaacgcccacgtgtcatgtctttctgctgatgctgtctgaggtcactctcactggcgcgttgctgttttatattctctttggagaagtgtcttcatttttttctgttctccttccctgactgttgtggtctgatcctcccttgtcacacatgtgacttgagggtgttttctccctgcctgtcctttcacgcaccgagcgggggcctcacactttcctcacgtcccagcatctccccttgttctctgaggcacagatttttctggtgtgtctaagacagcttgcctaatccgtggtcactgagattttctgttttgtcctagaagatttatagttttgggttgtgtatttagacctgggacgcgtcttgagtgaggtttcttacatggtatagcgtcggcacaggcaccttgacgcccagcggtgcccaccccaattgctgggagggctcccctctccgctgcattgccgttgcagctttgtaagaaactgtgggtttactttggactctcctgtgcccgacgtgtttgcttcactttgcaccagggccgtgctgtttctatcccttccactttaccatcattttcgaagttcagcgtcagcctccagccttgtttcttctttccacagttgttttgtcttttcctgaagctttgcgtttccacgtaaattataaagggggcttgtcgctttccactgggatcctgctgactctcagccattcagggagttgggcgtccttgttgctggtgtccagggtctcacagctccttctcccctcagggtgtccgtgccgctgctgaagacgctggaccacgtgctcacccacggctgcttcgacatcttcaccacggaggaggagtgaggctctgcttttcatgacttcctttccgattaagcctaagtagctcatgtattaaagaaaaagtcatcagacacagagatcagaattccaggaaatgatcttccagtgcgttctgggtcagttatggtgactgtaaataccgtcatcacagctggccctcaaaataacgcaataataacatatttacataatgacatattatgactgtaagtgcagtcagccccatctggggctgaggcgggggccctgctgtgcactctccccccagctatcccaccgggccaggggtgggcctcagggttgtgctgggagccgcagggcctgaaggggcctcggctgtacggggatgagactcgcaggggagagggcagaggccggtgacctggcgaggacttgcccaggagattggagctccttgcttctgcgccacgcggatgccccaggctggtctcagctgggttgttggctctgagtggtcatctcgttgctgccatattttcttgcttcattgaatttcaccgtgttgggccagtctttttttttttttttttttgagacagggtctagctctgtttcccaggctggagtgcagtggcacaatcacagctcactgcagcctctacctcagcctcccaagtatctgggactacaggcatgcgctgtagtctaatgtacggctaatgtttgtatttttagtagagacaggatttcactatgtttcccaggctggtcttgaactcctggccccaagtgcctgccttggcctcctaaagtgctaggattacaggtgtgagccactgcgtctggcctggatatatttgtatctggggcacgttgggtcatccggagacagcgtggtctgtttttgggggcactgctttttttttgtttgttttgagatggagtcttgctctgttgcccagggtgtagtgcagtggctcgatttcagctcaccgcaaccccgtcccgggttcaagcagttctctcgcagacttctgagtagctgagattacagctgtgcaccatcacacctggctgattgtttgtattgttagtagatacagggtttcaccacattggtcaggctggtctcgaactcctgacctcaagtgacctgcccacctcggcctcccaaagtgctgggattacaggcgtgagccactgagcctggcttgggcgctactcttaagctgtcaggtggacccagagctgtgctggtctccagggttttctgcccctttaaggtctctgctccctggcgcttcccttcccaccgctgctggggcagtgccggggcttctggccatcttttgggtggttcgtccccagccttggacagcgtcctcgtactcaggtactggctgacccaggcccaggttagtcctcagcggcccccaggaagccccctctggtgctcagaacctgagcgagctctgcagacttggaatttcccgcttctcaccacgggcttcccgctggagtctgccacctgctggacttggctctgccttaaccttcgggcgggaggcagatctggtctctgttgctccatctttgctggacgctgcacatgtttttaaatctaacagcattgaagggtttccccttttaatttcttaatggggcatcactgactgaccttcttacacctgctgttggaacagcctccatgttcacaggtgcacccagctcggttgtggcgtattatcctttaatacaatgctaaatactccatttaaattttttttttgagatggagttttgctgttgttgcccagactggagtgaattggtgcgatctcagctcactgcaacctctgcctcctgggttcaagtgattctcctgcctcagcctccctagtagctgggattacaggcatgtgctaccatgcccaggtaattttgtatttttagtagagatggggtttcaccatgttggtcaggctggtctcgaactcccgacctgaggtgatctgcccacttctgcctcccaaagtgctgggattataggcgtgagccaccgtacctggcctaaaatattgacatatatttttctggcttaaaaatttcaaaataagcctgggcgccatggctcacgcctgtaatcccagcactttgggaggccaaggcgagtggatcacttgagctccggagtttgagaccagcctggccaacttggtgaaaccccatctctacaaaaaatacaaaaacattagccgggtgtggtggtgcctgtacggcttgggcctgggaggcgaaggttgccgtgagctgagattgagccactgtgctccagcctgggcaacacagccagactctgtttcaaaaaaaaaattttttttccaagataggatggtagagaaaatacctcctgccatgtcctgctatgaatacagctttgtatttctctctacagttttgtcagttttggcttttcagattttgaagcgtgtttgtgggctgaatcttgcccttatcacccatttctaggatgctttttgctccactcattctttgtcttgcttcacttgactttgaactgtatacttttttccatcgttttactttcagtatcttcatacatgtatgtttttgtacgcctctcttagaacagtgtatggttttgtaaaaattcagcctgtagcttttacctgcctccttcatgacctttataatccccttggttctcagcctgccactcacaggacttttccctgtgctgcgttcccagtgccccctccccgcccccacctgtgctttttgttggattagtagaattgcttttgtcattccattgttttcatatatttgtttgggacattttacttttttctgttaacgcttaccctagaaattagaaatgacaccacgtattcttagcgaagtccagttttcagcattttgtccttattggacaatagcaaggatattagaacgtgttggttccgcgtgcttccgtcttgagttatgtgctgctattgtcggatattttgtcttagatgtacgtactttcctgttcattgtggtatgtgtaatttgcgttactttgaattttccacgtttttactttctttgtctctcatcacttactgcttttgggaccccccccatcggggttcacattccctctccctagagcacactcccttggatttcctcgagtggggtctgctgcggtgaagctttcccattttatgtgcagattattttcagagggtatatagaattcaggcagctgtttcgttgtagcacattaaaaatattttcccacttcctccttgcttctgttgttgcttttgagtgttacctctgagtctgcctgtgctccctggaaacggcccgggtttcccaccccctgcccaggtttgctccttccctggtttttctgtcattatcacgctcacgtgtttccctcggtcaccccctctgcaattttcacacgtcttttccctctctctttgcttcattacctttggcccgcctgccagctgctgattctctctgaagatgtctctaaatgacttttaactgtgatttgtggaattcttattgtggagttttgcgtcttttcaggtgtaggttttttgtctcgcgtgtttccacgtctgcttgtagcgctttccgcttcgccgttccctgcggcccttccttccgtgcccggtgttcatcctcttgaatgctcttttcctgcctgtttggctgggtgtgtctgagttgcaacctgagcgggtttctttgtcttcttacttgtctggtattgtgttctctcgggacgttgcgtttgaggggtcgcacctcagagcaagccgaggtctgggctaagcctgtgctttggcaggcaggaccttagtttgccttttctgggcacctgaggagagggtagcagcagcctggggtctccttgactcacggtcagcagtgagggtttcctggcctgttgggtggctggagcttggctgcattccccactgagagagggaggtgcgcaccttctcctccctggagtggccttccaggtgccctctcagagctgctcatcagggctgtgcctttgtcagcaccaagcctcagcccttgtccctgctgccactgaaggctcaaaacaacactgcacagccttgtgtgtcctctgtgtgtcggcagtttcccccggctctgcagcagcccaggccaggtagcctctggagggagtggtggaggagcacgggcatcctggccgccgctgtgttggggacagaccctggggcctggaaagggaggtggggccccgtgggggctgctgcaccacaggcaagagagcaagagacagcagaggccggccaggtggtggcacagccgctagggaccaggccggcctgtggaggtattgggatggggaccagcggacttgctggcagaggggcctcagggctgcaggcttcttggactgagccactgggaggacggagttgaccttctttgagacagaaaaagtgtgcatcccggggctgcctgtgaaagctcatctctaaagtgtgtgttgttcttccagccacccctttgctgtgaagttgcttgcgctctgtaagaaagaaatcaagaattcaaaagatatccagaagctcctgtcaggcatcgcagtgtgagtttcaagtgctgctggccttagacggaatggcagggcgcagcctcccttggctgagggcaggagtccacggctccaggcgggagaggagcagttagtgttactcctcaagctaacctaagatcgtgcattccaatgttcaaagcagtcgcaatgggaggtgaggcagcccaggtgctggtggagggagttcccgcgggaacaggcgagctctgcctctgctgccctcgcgctctgccctggcgggaggggaggctccggaaaggagctgcgtggtcaggggctgcctccccgattctcctgtgtgccctgggggtcgctgttgagtgccttgctctgcggcgctcaggtggacactgggcaggtgcgccagccagcgataggcaccttggctgctctgtggctccttgaggtgggggtcctcatggcagggcgagcggccctgcaggagatcctctgtgaggcgtcctcacttcccacagtgactttccaagtgcgacactcgtgtgtgtaggcacagtgcagatgtacgcacacacacacctccggcttggggccccaggcccgcactgtgctcacggatctgctctgcccaggtctctgcatgggcctttgggtccggggtttgctggggttggcctgcgcggggtggggctcacctggagccatgtgctgctcccggcaggttctgcgagatggtgcagttccccggcgacgtgaggaggcaggccctcctgcagctgtgtctgctcctctgccaccgtttcccgctggtgagtgcctgcccctgctcacgtgtgtttgccgtgtggacacaagcccctcagtgacaagaaggccttcgctggcactgttgtgttggtgtgctttccagccgagcccctctcgttaacgcgcctgggtgacgacgcgtcacaggcacgcggctgccaaggggctctggacgccactgttctggctttaaggacgggctgtccggctggcgtttctatggacatacattgaggggtgacctggcggtgggatctggctcaggagcttccagaaggacccaggctgaagtggttcagccacacctaggggcagtgcccttcatccccagcactccccggctattagatttctaggatttcttttctcctggctgcaaaaaaaacctcagatgatacaaaggtgacattttcctaaaaggcaaaagtaacttcatgttgtatggtggttctcgaagtggggtgccggaccctcaggcttggcacctctggggcttcagcagtgcagctcttgggccctgtgctgccgactcagcacctccagggtgggcccggggctcagaccaccagcgcagtgagacatgatgaccagggcaccactcaaaaagagagcaggcgagattgcttccctgatgaaaagagagcaggcgagattgcttccctgatgaaaagagagcaggcgagattgcttccctggtgaaaagagagcaggtgagattgcttctctggtgagggagcaggttggttaatagatagcgggcgagattgcttctctggtgaggtagcaggttggttaatagagagcaggtgagagtgcttctctgatgaaaagagagcaggcgagattgcttctctggtgagggagcaggttggttaatagcaggcgagattgcttctctggtgagggagcaggttagttaatagagagcaggcgagattgcttctctggtgagggagcaggttggttaataaagcatttaaacaagaatgatgtcatcttcactgctgggatcctgcagctagctgtgtgtctgtggagggaggaggtggttaatgggcctggaaggcacctcctcttggttgcagccctgctgtggctgggatgggatgcagggtcagcgtcctcctcctgacgccttccactgacggggctccctggcctgggtcctgtcgtctctccggggtggggcggtggcgcttccctccggcaaatgcactgcatccctgtcccagatccggaagaccacggccagccaggtgtacgagacattgctcacctacagtgacgtcgtgggcgcggatgtgctggacgaggtggtgactgtgctcagtgacactgcgtggtgagtgaaggcccttcctgcacggccacctgggcctggcaccgcccctcttcctgtccccaccgtgtctactcgtctctcccaaaaccctctgataggaggaggaaagagggttcccaggtctccacatcctctgcttaggttttacaaggcagccgtgctgctgtagccgaaacctcttctcaaccgccctgtccccaaacagtgtcaggtgtcaggaacacagcaaagccatccatcccaccaggggagcgggcacctgtaccacaaggctgtgtctggtggcctgtggagcagagggcactgaaggcctggcaggtgctgctgccccagacctctctaaagttctcttggaataggccgtgtgagcacctgttggaaatcaagaggcacaggcggaaataagaaaagctctccccacgcctctgctctgatgtccacccccttcctcagggccatgaggccctcaggaggccatagtgccactctccacgtttactttggcaggcacagtttctgcaacatgggctggcttctttaccatgggtggagtagaatggcggttttgaaagatgtgtgtattgagttgggggtgggagggtctgaatgagagcagagtggggaaagtgcaggctcaggtgtcctgggccaaccggtatgttcctgggaacagcagtgatggtgtcttacacatatgggcatgggcacccatgctggctcacacacatgctcacttgcacgcgcgcacacacacacacacacacacacacttctaaaaggggagcagtctcgtcaccccgtgttggagatcaggactgaagcaaccagaggctgtgtgggtgtccacatggcatacccggggtggtggagtcccaggtgtcctgcctgtggatgctgctctgttttgagtgccgactgtgagggcctccgtgctgatcccggtgcgttgctacaggtctgtggggtccacgccccttgttgaatccagcaaggacgtaggtgacgttccctaggtgtctcctcggaacagtgaccttccaacagggctgggttcccatagagctcacgcaccaggcagccgctgtggcctcggaggacagaggtggcctctccagggcttccgcgaggttttctggtttggggaggagtgtgtgtctgctcctaaacaaacacgtggtcccaggagaggaaccgggagcagctgggctgtcttctcaacatgcgttgagagaatggccatcttaactactgctctggagacccgtttttacaatgatttttttaaaaaaaaacaccaaggtgcattctggaccagattctaaaataattggctttaggactgaagaagccaggtgtcccgagcggggcgaggcctcctccagcgaggctgggtcggggtggcctcctttcctcacatcagggagggaggaactagcagggtgggcctgggggcttctcctatcgtttaatcccctttctgttaaaaaaaaaaatccttagaatttaaagagaatattttaaattagaaacgaaaaacatgccccagatatctccacagcattgctagaatttttatttcgcatcaacagctaaattaaaacctggaaaacccttgtcagcccctccttggcctcgcttggtctgtcctcccgcagtccctgcgctgggcgtggtccttcccgaggggcaccccttgttgggaaggaaccgtcctcctgcgattccggaaagggctcaggctcgaggctctgctggagaacgtgctcctgtgacgtcttttctgccctcagcctggctatggatgtcgggggtgaggtctcctttccctgactgcggccatggaagcttgacgcgggacctccgcacacctgaggttctccggtgggcactcgagagactcacggctctccctctcctcacagggacgcggagcttgcagtggtgagagagcagcgcaaccgtctgtgtgaccttctgggcgtacccaggccccagctggtgccccaggtaaccctgtcaccttcacagcatgaggtgcctgtgcttccctgagctctggaatgttctggggccagcggctgtgcttagcttctgccagcacgtccacacggcccgttccctcgtctcatgtcaggacccctgggattacgggaccagcagagctgccttctctggccactgcccacacctgtgggcccctgtggcatccaggccacttgctctggggcgtttggggggccggggagtgggtggagctggcaccagcttgatccaggctcctcatgcctggccctggggtctgtttgtgctccaagtgccaagagtgccaccctacccctcctcatctgcttcccatgagtggggccggggctgggtgagaggcccccagaagctgcccctgtgcacctcaccagcccgtcactcttctaaagtaacaaaaacaagtacctcagttctctcgggggctggggcccagggttgctgtgctgtctctctagttaccagggttggctccttcctctcagcctccttccggcaggaggttatatctgagagggaggaggagaaccatgtctagatacatgggggcagtggggatgggctgagcatcaggacacagcctcccccatttctgtgtgtgtaaaggctgaactcaacagcagactttggaattaaatgtgctttttacatttttattaggaaaaatttcaaacgtgtgaatgcaggttaagagcagtgcagtgaacctcccttcccgctccccagatggggtgcccttccgaggacacgttagtcatgagcacctgtcagccacatagctcaggctgccgggtgtgtgggaaacggcacaaatggtttcctgcaggaaccgtgtcagtccccacacagggcccagaggggtgagggtcccctggctgggaatggtgtgtgttggagctgaccagcctgagcttgtcttgtctcttcttcagcctggtgcctgctgaagccagtcctggagcccatacctcacccctgcctggtgaggatgtcttgttcctgagggaggccggtgtggaaagcctcgcacagtggtgcctccagctgttgaagggtagcgctggcccttggaggctggcactagctgacagcttttcctctctgcacctgcgctctggtgacttggggtggacgcctctgccttcacttgaacacaaatgtgcttcctataaaatcatgtaccaagaagttcctgccttttgtctctgagcctgatgtgtgtaggggtgatggaaaggctcactgcccaggggtcagccagaggggaggtgggctgcactcctcctgcctggagaccaggcccccttcttgcctggtgctgtccctgctgtgggagacgtctggccacaggcagtgccccacccagtcttggagagagatgaatgttaaatcagaggttcaaatgctagagaactgagaagccctggtggcaggcatggtctggagtgctgggcagatgctgtttctgggcccgtctgcctggtgggggtgctgtcctcccccctgtgcacacgtgagcatcgtgcatgtggcccctctgcagtgcaggagtcactgattgatgggtgtgccgaccagcagcttcacaaatgtctgctgcaaggggaatcgtcagagtccaatgtgtgcctctacagtaatgtcggaaataaataccattcttgaaataattacactgtcttaggagagcctgggcagagtccacacttgggtttttaggcaaagggcaggaggctacctttgtctctgtgtctgagctcgtgctgatccatcccaaagctggtgaggggaacgtgtataaaaatttcactgtggtagcaacccacacccatctctgggacctgtgctgtgctcatagggcttgaggtgcagaaccacggccagcagcaccaaagcagccccaggtgtggccactcagaggcccaagggcttgggtgagcaaccctttccctatgtgaggagcccaggggtgccatgtgcgtggtgtagattagggtggctccctggcctgctctcaggtggggatggggcctggacacaggaacatgggcaggccgagaactgggaggtgccaccgcatctgtgaggcttgtgaggtcaccaggaccacaagaccaggactgtgacagtccgtgctgtgtgtttagcagacagctcttcacgggatgtgtgtgacgacctggccacacaggagtgtggggttaacacactactgttgttgtgtttgacctggtggccaatggtctttataccctaaaagagccttgggttacatttttacgagatttaaatattttattccaacctgtgtaataggggtctcctcctccttgaactgtcccgattggctggggtcacgtggtgagggtcctgggtgaccaggcctagccttggccacatgagtccacacagtggaaaaggcttggctcctgtggtcggcacacacgagactctggttgcgcctgctgggtgtggaacaggcgcaccatcgccatgcctgcagctcacaaagctcctgctggcctgggatgcactgaggatggaaggaacaagtggcttctgagaaaaacatgatgaactgttcttagtgcaattaaaagaagattccagataaatggcattttaagacatggaggcaggtcgattacccacccagacccatcagtgacactatgtggcaaagcagttcttcttttaatgtcggtctaacttagcaacccgaggaaagtggatcactccactggccactgcctctttcccactggatcccatccatcactggggcacttgtgctcaccagacacctggtggcctggaaagccctctttcagcagccgtttctggagcccaccagggtccaggtgatagagtttggcaaggaaccccttgctcacatgatagctggggcagacaatagcaaatgaacaagcaagcaccatcaaggcaggcaacactgagtgctatgaacaaagataaagtgggcaatggaatggcatgttgggtgttgactccgagaaggtgttcagaaaacctctctgaaggggcagcatttgggcagaggtccagactgtgtccaatggcagaaaagagaatgcttgtggtcccagaagtggagcaagctttgtgagtttagagagcagcaagaagccagtatccctgggaccggggagctgatgtgggatttgtgtacccacaaacacgttctaggtgctaaccagaaaccctccatgtgagagcagagaccttggagatcctgagggtttctgctgagccctggaatctagtcacgctattttgatagcagaatggatgagagaatttaaggcccagggccagatctaatggaccactatataaagctgggaccctaaataagtctttttcaaaggaacagcagcaagactcttatctcaatctatctcccctgaagtggcctgaattaatactacctgtatgatccccaaaactcctaaagtggaaaatttgattgacttggccctgaccagtggtattcccagacaagggcagaagatgcaaatacaaaacctctctggtagaatgtaggctataatatgagtacatttttgaaaagggctagaaatgatcaagaagagattagaaaaaaacagagcccctagaaatgtaagaagtgaaatgaaaagctcaatggatagcttagacacagctgaagagagaattagaaaactggaagatctgaaaacattatccagagaactggaagatatgacagcaacatcaagagacattgaagaatgtctaacctttgggtaattggggtctcagaatgaaatgaaatgatgcagatattccatactgacatgcaacagtccccagatacagaagcctaacagtctcacatttagacctgccacagtgaaactgcagaactgtaagaaggacagagtgatataaacgactaccaatttcccagcagcagcactggagttgagcagtgagtagaccaaggtcttcattatgctgagagaaaatagctgtcaagttgcttgaattgtgcccacagcataacattaaagaagagaacaaaattaagtcatttagataaaaatatgccattcttatctgtttggttttttaatcttggcttaatatttggggttgagtcatttgttttgagagctgtcctgtttattgcagggtgttcagcaacatcccagatggaagcagcatccccctacccagctgtgacaaaaagaaaaaaaaatgtctccagacactgccaaatatcttctgggggtgcccctggttgagaaccactgctttagtggataaactttaggcaggagggaaatgatcgcagttggatagttggaggaatgtggagcaagggaagcaataaactgtgaccataaaaacatagaaagatggcttatatgtggatttttttttaaagcacgtagaattgcttaaaatggacaacagcagcatataaatcagtggcagagttggtggctgaatttagagcatcttaagtctatgttctcctggaacagagtgcagataattcagttatcagcttggctaggtgcatgttgaagtatttagtcacacacaaacagttaatgtatggggaagataacttctatactagtaggagagaaatggaacaagaataaaaaatacactatcaaaatatgcaagaatggcaagaggaaaaggcagaacaagctgcaaaacacacacacaattagaaataaatattttgggacacaataaatgtgaatggattaaaacctctgttaatgacaaagttctccagttaaaggaaggcaaatagtgttattaggaatagattactatatgatgattaaaggctcagttcaacaggaagatgattgatagaactttcctacatttgtaacacagtcttagaagatactaaagcaaacattcaagaagaaattgatcacctactaccatagtgtattttattgaattggtacatttcaataaagtgtcataaggcacggttgaaggagaaaaacttgacccaatggacagttacagaacccaagtgtgtgtgtgtgtgtacacagaaattttaaaaatgtttttaaaaacatctctttaaaagaaataatgaaaattataaaatatataatgaaagataaaagttaatcaaaacagatagagttcacctaaagtggtgcttaagcgattctgaagtcgtgaattatacattacagaagaaaggctggaaattaatgagctgaacataagcagaggactaactgtaaagaaaattagaataagagcagaatgaaaaggaaatgaaacataataaagaaacaaacccagatggttcttcggtgaaaagacccacctgggagcagctgccatgggtccgtcagctgaagtgaaggaagtcctggccctcctgcaagtgcagtgacctcaggttgtcctcaaaggcgccccctgtgaggtcctgtcaggagcagcagattcagctcagtccggtctcctggctctaggaggccactgtggagcctcctccagggccaggggttgggggtggcctgtgtccacctgtcaagtgttctgctcctctgctaatagcggagaggctggaaggagacaaaggccagagagggcagcagccggcactgcttgtaccacaggccctgttggtcaccagaggggaggccccccctgccttctggccttgcctctctacataaggtggctgactctccctgggggcactcggaatggaatgagactaacaggcaatgcctctgctgtttgaccagggcagacccaccttccctccacacacccacccctctgcacaggccaggagtgggaggaggcccctcagacagaaactgcatctcagaaccatcaacagctgcccctgtctgatctcctctggcctctgtcatccccacccctgcaatggagtgagggctgtgaccccgggtccctggatgcttaatcttgtcctgtgtgctggccttggccaggtcacctactctcctgtatgaggccacagcaggtgtccagaaatgcctttcagacgtgccctgcaccccagcacctcctgaacaagttcctgaagacagcccggcagagtggtggacacaagtctctggcctctggcaggacagaggagggactatgcattcctgtcacagtccttggtccttgggcccagcaggaggaatcggagcttggctgcgccccttacccccaccacatcagaatccattacaccacctaccactgctgtcactcaaatgatgctgtcactcaaagccatccttcctggaaaacatttccacacactctgccgctatctgtccttcctcccttgtctctctgctctagagtttgcaaaggaaacacacctgagttcagggaccaggccagcccagtgcgtgttgacaccgtcttaaacaagactctgttaaaactagatgcttctgtaaagcaacatgttccattaggagaatgaaaaggcaaaccacaaaatggaggaagacatttgcaaaacattaaaccaacaaagtcgagcagccagaggtgtaggggactcctacaggtcaggagagacgcagcgtgcagtaggccggtggggaaccctgatgagaaacaccgccagagaggaaggaactccagtgtccagcgggcacggggggttgttggtcagactcacacctgaaaccaccatgagaacacactccccaaacggctggcgaccaagtgcccagcccagtgtgagggagccgagcagctgggccctctggctctgggcatgttcctgggcatcatccagagaagctgaggatgcagccacacccacgacctgccttccactcccaggattagacccgaggcagggatgctcacgcaggaggacacagcgtccttgcaagggcaaaccgggaaccactgcccacaggcctgggtcctggcgtggcctctgggtggggtggcgtttgcacacgggacgtggagaaagtccacaccatgcacagcgatacgcacacaccccaaacacgtggagtgaaaaccagatgcgagaacacagacactggattctgctcacatgaactacaaaaataggataaattagactatggtttagggatgtgttcacgcacacgccatgagggttggccctgccaggtgccaaatgcacgttcacaaccaacatagacggcatttcgttcctggaaaagcagtgatgtaaacgatgttgggacaattatccaaatagaaaaattggcatctgtaatcaaaagaaattccagttgtatcaaagatgtaattaaaaactagaaatcccagaagcaaaatgggacaatgttgttttttaaatttcacaaccaggagtgattgtcttagaatgaatcagactccataaatgaaagtcacttaatttgattatatcacaatggcaaaaatacaaaaatatcaaatggcaggaaaatttgcagcatgtcggagagttttccttatgaaaaatactgaccaatagaaaaatgggctaatgaaaataataatttactgaaggggaaataaagcagtttataaatatgtgagaagatgctttccctccctttaagggcacgaggcaggtgctccatcgctggtgggttgggttggcacagcagctgcgggtggtgaacagccagactgggattgaatgtgtgtgctctttgacccagaaatttttagaatttattccacacagagccacttgagcgaaattatgtatatatacaaatactgcagcagcattttaaacagcagatgattaaaaatggccaaaaggtacatcagtaagtaactgtatcacaaatgcatgaaacatccatataatcgaagagcgggtgttttagtgacaaacgtgaaccttgggtttctctttactcttccagctaacggtggaggaaggcacaacaacagtgccaccgaggtgccctgagacccgcaagctgctcccgccaaacggaattgcaggggagcctgatgcggcctcggtctgaccacctctcaaaaggatggagcagaacacgcaaaaccacagggaaccggtcggcagagtgcaggatacacaagcccattcttcagctgaactaagaaaagagcgtcggcgtcagggagacagaaaggtcatgtcgtaaaggtcacacggacgctgccgggttccagcaagcaaacttaaaacatgaagcaatttataaggcaattaggaagatttgaacatcgatgggatatttggaattctgtggtgggatggtggttttatggtccttttaacagtttttatctccttgagatagggaaataataatggatgaaattaggctagaatgagtgccacaacaccagcgtggggatttggaggtgtggaggacacataagatggacacgcttgctccagggatgggtacatagggctggtttcctgtcactttgctaatatggctcaaataagctggaaatttccctgaatagaaaagtcacagcaacagtagagcccgggggctccagcggcttcacacggaataacctccaatctacacacgtgaaaagagcaagagatggaacaagcatgtgctgtgaggccacactgccagctgcccctggaagaacaagcaagagacaggtgaccgtgggggctctgggccctccaaggacacagcgtgtgcaggacaaggaggaacctcttttcccatgctcagccggctccctgggaagggttttcaccaagtgccttggggttcatatgagtgccccaagatagtagtgacaccacaggtcaccataacacatacgataacagtttgacatattgcgagaattaccacaaggagacgtggagtgggcatgctgctggaagagcggcactgacggggttggagagggggtccctgagaagtagatcctgaagaggctgtttctgaaaaactaaaccagattcgtgtagaatttgcattttataactgcttctcggagcctcccgtttactcacctaaatgtccccggtaacttggacaacggttattcaaaggttttcattactttgctcagatccatcagagcaatcactatctttggcggctacggccttagaaaacgtctttctccaataagactggaaagttggaatgactcctggacccacggtctgcagaacggatgctgtgtcagcacaaaaacacgaacccctcgtacatcagcctcagagctcctgggtgaccaggtgcaccgtcaatgagcagtcgtattttgaaaggaatctccttttctgagcactgggcctaacggtgggcttacactattccatcaaccgtgctgtgcacagatgtgctgccacctgggccttgccgttccatttctagagccacaggcagagcagatttagcctcattcctaagaatcctaggattctcagaatggcgaccactgccttcaacttaacccatttatggctgaggttgcaatttttcgaatttttgcaatcagatcttggcagtgaccttaagcagaatataaacttgcacatgcttagcgttccaataatggaacactaggcatagatgggttttaaagtcacggcaaagagtcagactgtcttttgaagctctgaagccaggcattgacttctccctacctatgaaaggcctgcatggtgtcttcttccagttcaaggttgcttcctctacactgaagatctgtggttgagtgcggccacctccattgtgaccgtagcatgatcttctggagagcctgctgcctcacctcacactcatattacggagacggcttctttccttaagccttgtgggccaacctctgctagcttcaaacttatgttcacagcttcctcacatcattcagccttcacagaattgaagagagttgggacctcgctctgtattaggctttggcttaagggaatgttgtggctggtttgatctgtcagaccactaacactttctccctatccgcactatcatttgtgtgttcactggaggaccacttttaatttccttcaataacttttcctttgcattcacaacttggctaaccgttaggctgaaagctgggcctctcctgccagtcgtggctttcgacatgccttcctcactaagcttaaacatttctagcttttgatttaaagcgagagacgtgcgactcttcctttcacttgaacacttagagtccactgtggggttattagttaacctaatttcaatgttgtgcctcagggaatagggaggcctgaggaggggtggggtgggggggagcggggaggcgacagctgctgtcagaacattcgcattttatcaatcaagttcactgattcatatgggcgccccgagatagtagtgacaccacaggtcaccgtaacacatacagtaacagtttgacatattgcgagaattaacacgtggagatggggagacgtggagacgtggagtgggcgtgctgctggaagaggggcactgatggggttgctctcgtggggctgccacacgcctgtaatttataaaatgcacaatgaagtgcaataaaatgaggtgcgccagtagttgccagaaagctgtgcccaagaggctctgctcacgttgttctgcctggacttgacttggattagttgtgtgacagctcatcacaggccgggcagtgtagaccaacacacgctggcctcacggcttctgcggggcaggaaccgtgacccgccctggtgtggcgtgcttctagctgtcacaggtgcccatgtctgtgtgtcccccacaaccccccaacagtaccgcttggggcctggctcactctatcaaccactcacccgtggttatttaccaagaaaatgcaaagcaaaaaaagcaggggttgcaatcctagtctctgataaaacagactttaaaccaatgaagattaaaaaagacaaaaaagggcattacctaatggtaaagggatcaatgcaacaagaagagctaactatcctaaatatacacacacctaatacaggagcacccagattcataaaacaagttcttagagacctacagagagacttaggcaaccacacaataataatgggagactttaacaccccactgtcaatatttgagacagaaaattaacaaggatattcaggacttgaacgcagctctggaccaagcggacctaatagacatctacagaactctccaccctaaatcaacagaatatacattcttctcagcaccacacagcacttactctaaaattaaccacataattggaagtgaaacactcctcagcaaatgcaaaagaacagaaatcctaacagtctttcagaacacagtgcaatcgaattagaactcaggattaagaaacccaaaatcgcagaactacatggaaactgaacaacctgctcctgaatgactactgggtaaataacaaaattaaggcagaaataacgaagttctttgaaaccaatgagaacagagagacaacgtaccagaatccctgggacacagctaaagcagtgttaagagggaaatttatagtgctaaatgcccacatcagaaagcaggaaagatctaaaatcgacaccctgacatcacaattaaaagaactagagaagcaagagcaaacaaattcaaaagctagcaaaagacaagcaagatcagagcagaactgaaggagatagagacacaaaaatcccttcaaaaaaatcaatgactggttttttgaaaagattaacaaaatagaccactagccaggcaaagaaaagaagaatcaagtagacacaataaaaaaagataaaggggctgtcaccactgatcccacagagatacaagctaccatcagagaatactataaacacctctatgcaaataaactagaaaatctagacgaaatggataaattcctggacacatacaccctcccaagactaaaccaggaagaagtcgaatccctgaaaagaccaataacaagttctgaaattgaggcagtaattaataccctaccaaccaagaaaagctcaggaccagatggattcacagccgaattctaccagaggtacaaagaggagctggtaccattcattctgaaacttccaaacaatagaaaaaaagggactactaactcatgaggccagcatcatcctgattccaaaacctggcagagacacaacaaaaaaaatttcaggccaatacccctgatgaacactgatgtgaaaatcatcaataaaatactggcaaactgaatccagcagcacatcaaaaagcttatccaccatgatcaagtcagcttcatccctgggatgcaaggctggttcaatatacgcaaatcaataaacataatccatcacataaacagaaccaaagacgaagaccacatgattatctcaacagatgcagaaaaggccttcaataaaattcaacacccttagtgctaaaaactcccaatacactaggtattgatggaacgtatctcaaaataatagctatttatgacaaacccatagccagtatcatactgaatgggcaaaagctagaagcattccctttgaaaactggcacaagacaaggatggcctctcaccactcctattcaacatagtattggaagttctggccagggcaatcaggcaagagaaagaaataaagagtattcagatatgaagagaggaagtcaaattgtctctgtttgcagatgacatgattgtatatttagaaaaccccattgtctcagcccaaaaactccttaagctgataagcaacttcagcaaagtctcaggatacaaaatcgatgtgcaaaaatcacgagcattcctatacaccaataatagacaagcagagactgaaaccatgagtgaactctcacaattgctacaaagaaaataaaatacctaggaatacaacttataggggatgtgaaggacctcttcaagaaaaactataaaccactgctcagggaagtaggacacaaacaaatggaaaaaaaaaattccatgcccgtggataggaagaatcaatatcatgaaaatggccataaaataatttatagattcaatcccattcccatcaagctgccattgactttattcacagaaccagaaaaaactactttaaatttcatatgaaaccaaaagagagtctgtatagccaagacaatcctaggcaaaaagaacaaagctggaggcatcacgctacctgacttcaaactattctccaagtctacagtaaccaaaacagcatggtactggtaccaaaacagatacatagatcaatgcaacagaacagaggcctcagaaataacaccacacatctacaaccatctgatcttcgacaaacctaacaaaaacaagcaatggggaaaggattccctatttagtaaatggtgctgggaaaactggctagccacatgcagaaaacagaaactagaccccttccttacagcttatgaaaaattaactcaagatggattaaagacttaaacctaaaaccataaataccctacatgaaaacctaggcaataccattcaggacataggcatgggcaaggacttcatgactaaaacaccaaaagcaattgcaacagaagccaaaattgacaaatgggatctaattaaactaaggagcttctgctcagcaaaagaaactatcatcagagtgaacaggcagcctctggaatgggagaaaatttctgcaatctgtccatctgacaaaggtctaatatacaggatctacaagggacttaaatttacaagaaaaaacctcatcaaaaagtgggcgaaggacatgaacagacacttctcaaaagaagacatgtggccaagaaacatgaaaaaaagctcatcactggtcattagagaaatgcaaatcaaaaccacaatgagatatcactggtcgttagagaaatgcaaatcaaaaccatgatgagataccatctcacaccagtcagaatggcgatttctaaaaaatcaagaaacaacagatactggcaaggctgtggagaagtagggatgcttttacactgttggtgggaatgtaaattagttcaaccattgtggaagacagtgtggtgattcctcaaggatctagagccagaaatgccatttgacccagcaataccattattggtatatacccaaaaggaatacaaatcattctattataaagatacatgcacgcatatgtttactgcagcaccattcacaatagcaaagacatggaatcaacccaaatgcccatcaatgatacacgggataaagaaaacatggcacatatagcccatggaatactacgcagccatgaaaaggaatgagttcatgtcctttgcagggacatggatgaagctggaaaccatcatcctcagcaaactaacacaggaacagaaaaccaaacaccgcatgttctcactcataagtgggagttgaacagtgagaacacatggacacagggagggaaacatcacacactgggacctgttggagggtggggggcaaggggagggagggcattaggacaaacacctaatgcatgcggggcttaaaacctacatggcgggttgataggtgcagcaaaccaccatggcacatgtaaacctatgtaacaaatcttcatgttcagcacatgtatcccagaacttaaagtaaaattaaaaaaaaaaactactcacctcagccccccgcagccagcctggactccccacgcttggggaaaaaggctgcatttggagcccgaggcacccatcacctgcccaccccaggcaagggtcgttcacactcaggggctgaggacatccccgatgcagccacctcagtccacgggagctggaggtcctggccttggcccctcagacatggcaccgcagggcctcgtgctttgcaagtttctaacaaatgttggctttatgggtattttaagacagaagagagaccggaatccatcccccccacacccatgcaggccaccctctccagctgcctcctgcccccagggcagcggccaccaccccacagcctggtctgtggtgctgttgtggacggctgtggcacctgtccccatgcccaccatcggctggggtctcatcccaggccacacagtcattgcacagcagggcgggttgtccaggtggcagagcccgggatccccaagcccttccacggccaagggccccacactcaccagcttcacgcagatgacgaagggtggccgggcggctcggaagtgcaggatggggattcggggcttgggtctttcctgagagtgacagtggccatcagtcctgcccgagcctggagcttgtccccggagagacgccctcagggtgcacgcagccaccaagttggctcacacaggagccagggcttgggcagcagataacgtgccagggtcacagactgcggcaggtgttcagagcaggaacccggctcccgccacccccgcctgacacccgactgcagaactgaccagggtgggctaccccaaggcctagacccacgagggacagcggggttctccccccaagaatgggggctgggctccctggaggccccgaggagccagcacggcccaggtggactctgccaagggggaaggctcggagcagctgtccctcagccccggagcaggtggttgaccccaagggtgacaccatgcggccctgcacacctgagagtcctcgtggcaatagaagcctttcctgatcttgttctcgtccacgtcacagaatgccaccacctggggacaagcacagaagggcagctctggacaggccggggccagggcctgtgctgtgggacagtacgggggcagggcaggcagtgttggagggtggcaggatgctcaccttgcgctggctgccggcagtcaagctgcggtacagccggcgcccctgcttgccagcgttccagatggtgaaggccgcccagcggggcagggcctgctcttccaggaagcggacgcggtgggtccagatggtcgtcctgcggtggagaagagggtgataggcaggccggaggccccacagatgcacacagatgctgacatacagggacatgatgtgtgctcagctcacgttgccagtggagtggacacctggcccaatgcctaagagagactggctgtcctacagtcaggccacctgccccagctggacgtagccacatgcctaggtggggatccaccccttccattagaccccaacaggtggggacagatgagaagctgtcacttaagaatctagaaggttctggaaggcagaatttctgtaggacgcagaggactggacttgacccaagtccagtttcccagagaaacctttgtccataaggacacatgcaaccatcccataaaatcccagcgttcacacttggacacgaccttctgcctcagggtcgctgccccgaacccttccactcccctgggaacctggtctctgttctccctctgctgtgacaagtcgaccccaggctgctgtcccggggggagcaggctccttcccatgacctgctgctctgcccagcgcccagccccatcgctgcccgggcccttcccagccccgccctctctcctcccaccgcagcccctccccacgtgccccatcgctgtctgcctgtgtgtgcctctccctcaaccctgctcctggagctgcccgggctgagcccgtctcaaagccccaggagctggacgggccagaagctagaggggcaggggatgcagaggccaacggggccagaacggcgtgggatgtgtcccagatgctgtcctccccaatggccgcgatgtagccacgctgaagcccggtaccccacagaccctgccctggccgagtcctgggatgccctctgctgtgtcaagggagctgtgtccgtgggagtctcctccggggtggggtctgggccagacacaaccaacactggctggtgacgggcctcccctgagcagggccctcgtgggttcagcctcgggatcggggcaggatttcgctgttctacgattctgctgctgcctccgcctcccgggataaacttgtgactcccccccaaccctgtggcaccccctgtttgtagcagaacccccacaggcaatgggatgggggggatggggggacacggggtcccctctgtcagctcagggagctgcagggcttaggcactgtcagggaggtcctgcctggagtctaccttttcctccccaaccctctgcagccacctcaatagtccggaccccacctgggacacagggagatgcttatcccagtcagtgacttggggacactgaagcatgtgtgtgtgtgtgtatactgtgtgggggtgtatggtgtgtgtgtgtgtacactgggggtgtatggtgtgtgtgtgtgtgtacactgggggtgtatggtgtgtgtgtgtatactgtgtgggggtgtatggtgtgtgtgtgtgtatactgtgtgggggtgtatgtgtgtgtgtgtacactgtgggggtgtatggtgtgtgtgtgtgtatactgtgtgggggtgtatggtgtgtgtgtatactgtgggggtgtatggtgtgtgtgtgtgtacactgggggtgtatggtgtgtatgtgtgggggtgtatggtgtgtgtgtacactgtgtgggggtgtatgttgtgtgtgcacagtgtgcatgtgtggtgagtgcatgtgtacatgagcacgtgtacagtgtgtgcaggtgttcggagtacatgcctgtatgtactgtgtggatgtgtgtacacgcatgtgtacacgtgtgtgcagtgagggcctgtgcatgcagtatgagtacatgtatgcagtgagtgcacatgcctgcatgtaccgtgcagatgtgtgtacatgcagtgtgtgtgcacgtgagtgcgtgtgtgcagtgagcgtgtgcagtgagtacgtgtgtatactttcgtgcacgtatgtgtgtgcatgctgtacatgtggtctgtgtgcacgtgcagtgtgtgtgtgtgtgtgagaacctgggtgaggacagctcctgcagacggctgcggggacttccccaccaggtgacgcagcctcgccgggttttggcatcttgtccttagcagcccgggtgtgttgggtgtctcggggcggggggacgagcctgatcctcctcatccactgacatcagcttagggaccccagggggttcacgtgacaggaaagcagtcagggctccagaagaaagcggggggcctctgtggccgtgggtggcacgcgaggtttggggggcctctgacaccggcctcctcgacggccccttgtctcctgggctttcctaggggtctctggtctgaaaatgttggcccatcgtaggaaggtaaaatgtagaagcagccatgatgtctgtatttggttcatcttcatttttcacattttaaaaagttctcatttaatcagggagaacaggctccccagggcgccctatgcctctctttttacatcctcagaggaagccgtggccccgccttagcaccgggaaaggtggaaacccagtttttcccaaaagcacaagacagcatttctggaaatgttgcaaaggagctgaagtgtcagggacacgtcaccgcatgaggaggcggccaaggtgccggtgggcataagggagaggagcgcggacgcgggaggccccagcatgcaggagtgaggatgatgcccccaatggggaagctcgtggccctcctgccaaccccccagccccaccccgtgaccttggaccttagaccccctggggagctgggatcttgccgagagtctcaaccccatcacggcaggcctgggaccatcgcggctcccacacccacacatgaccctagttggggtcttgagactccgggggccctgagtacccgtaggggccgagacgcaagcctcggacggcggcctgctttccaacttaacgctgcggcacgcggcaggcaggtggccgagacctctgtgtcctcacagttctaaggagggaactgtctgcccggatctaaggaaggaattctacatgcagtttcaccccgatttgcctcacccctgccacggctccaacgcagccacgcggcacccccagacccgggcccacgtggccgctcctcacagtgacacgggagagggaggcggaccccgcagcactgggcgcgtcctcactgggtgctgcgattccctggccgtgcctctgccaccctccacggcagctgcgccccccaggcctgtggtccccgccggaccccactcatgagactcccgtcgggttaaagggagcacagggtttcagaaggacccggcgcgtggtcattttacctctgggaactagggaaggacgttcggccttcaccctggcgctccctggcgcccttgggaaatgccccttcgtggacgccgaatccccgccaccctcgggatgtgctgttgccccgtgtcccaccagaccctgggtctcaaggcagagcctgaccacagcctctggggtcggccccaccaaccccggccccgacctcgggcgcctcccgtgttcctggcctctcaggcgtcccggggccgggcggggctgactcactcgaggacgcagtgcgtggccgcctgtgggtggtggcgatacagcaggagactctggtccacgcggatgacgccgccgcccttcctgaggtgctcgtagaagaacagcaggtcctccgggacgccctgcagggcgggagaagcagaggcatcactggggccccagaaacgcgtgcctgccccggatgcacactacacctgcgctcagccggccaaccaggaaccggtggaaaaggcttttgttgcaaagaaaccggtctagaggctcaacagggacgtggggcggcgaccacaacagacgtgagcaaccgagcttctccacaggcgggaaagaggggaagggagggtgggctgggtcttggttctgccccaaattccattttgagcagtaaaggtctcagggcaaagaggaagacaggcagccgaggaaaggggctggggtgggtcagggtctcacagccacggctcctggatggctggtccggcctccgtccccatcctttcctgccagtggctgcagccccagaagctcaagggactcaaagtgccgactgtgggcagaggacagtggtgctgggtgggcgtgtggggctgcgggcaggggagcccagcagtggggaggcagccccgggcctgtgccagccctgctcacttgtccaagctcagaaacttgaacctcagcccacggggcttatccccgaacactccctccatgtcagtgggactctgctccagaacattctgcaggcattcccaccagacttttctgtcctgtgagaacctgggccctgctttccccggcccatgatcccagtggcccctgccctctgcttgctcctctcctgggtgaccccaatcctcagcccagggctctgggccttgtgtggagccgggcccctgtcgctttcttaaattcaaacaaaactgagggaggagcagggcgtggagtctggtctcctcgtggttctctgcggcagctcacctgggtcagccgcccggagacacctttgctccaggaaagggcaggttttctgagagcctagcagcagggccagtctatcaccaagtccagcctcttctctccttggctggtacacaaacttcaagtgcaggtcagtaaagtccccaaactatcacggcccaaccgctggcctgtttgctcccaggacagacaggcagtgctatggttccacgtccaaaaaaaaggcactgtttaacctccgcctctccagggcgatcccttttacaaaaaccacgatgacatggaaagatttgtaagaagatgctgagtcaaagaacagacctcaaaatcatgtgtcagccctgctaaaagtttatccaccataagataaagacaaaggaatcacagaagcccacatgctgtctcacacgggtgatttagggtggagggtcccgcgggtgctggtggacacggaccctcacacgggtgatttagggtggaggctcccgcgggtgctggtggacacggaccctcacacgggtgatttagggtggaggttcctgtgggtgctggtgggcacggaccctcacacgggtgatttagggtggaggctcccgcgggtgctggtggacacggaccctcgcaggggtcactgaggtattttctttaattttctgtgtcttcaaaggcagctctaaagagcactggaactctcaacatgttacaggtttaagaagagaaaaaaggtttctctcttcctatcaccagaagagcccgacccttggggttttcttattttctggcagtaaagtgagaatttagtcaacagccgctcccgggtggtgcctctgccctgggaggagggggacgcagaggatctgtcccatttttctcccctcccctgattgctgctgctgagacctgagaggcccgaaatggcctcactcctcccccaggcttttcccaatcagcctccaggtgcctggactgccctgtggtgtggaggacccctggcggggcgcagggagagggggaggggtcacaacccagaaaggcatcagggaagaagccgagtggaggaagtgtggccgccgcccagccccaatctgctcacagaaccatcctcgggcagccttgggggatggagcacccagaactgcctggaggagaaaagcgtgagctaaagccactcccaggaaggccgggccagaggctgtggagactcggatcctgaggcaaaaggaagccgagtcagggacgcgcttccttccccagggctcgtccccagcgccacccgcccttctctagagccccatccccagcgcgaacctccaggaggaagcagcagtcaccacgcggggacagaagggggagagctcgagccagggcccagcgattggagtccgcggaacgcagggacatgaagtccagcagagaaaactaaaaactggcaacacttccatggataaaaattcagcctctccctctacaatagcaacaaaccccaaaccaggaaacagagacccctgtaaataacccaccaagataaattccacaccctccaccagtgtttcaggctacagggtgggatatgcggggaggtggcggagacccatcttgaatcagaaattcaaggactaagtgcaaaactggaccctaatggggtgggtctagagcattgaagaaagtgcattagtgcttggctagggctggcaggtggctgttagatgaggtgcgcccctgggtgcaggaagtgttttttgggggatgacaacttcctaacattagatggtagtggtgactggtgattgtacagccctataaatttgctaaaaaaaaattgaattgcacattttaataggtgaattgtatggcatgtgaattatacctcaataaagcttttatataaaattggatcgatttaactaaaaaaagaaattttaagaagagacaaaattggttgggtgtggtggctcatgcctttaatctcagcactttggaaggctgaggtcgggggggtggattgcttgagcccaggagttcgagaccagcctgggcaacatgtcgaaaccagtctctaccaaaaataggaaaaaagtagctgggcatggttgtgtgcacctgtagtctcagctactcaggaggctgaggtacaaggattgcttgaacctgggaggcagaggttgtagtgagtgagccactgcactccagcctcaggaacagagtgagaccctgtctcaaaaaaaaaaaaaaaaaaaaggaacaaaatatatgaaaaatgaagactaaattacaaaatccttaagagaaaatgattttaattaaaaatttaataagggacactgaagaaaggaaaatagaaattatataatgaaagaagtgaaaagggttagaaagactaagaaaatctaaccaacatagaattggagtttttaaaacacaaaaaacaatagacatagctagtatttaaaacggacgcctacaggtgcgtcccacgggggatggggacacggacgcctgcaggtgcacccccacggggggacggggacacggacgcctgcaggtgcaccccacggggaggacggagacatggatgcctgcaggtgcacccccacggggaggacggggacacggacgcctacaggtgcacccccacgggggggacggggacacagacgcctgcaggtgcacccccacggggggacggggacacggacgcctgcaggtgcacccccacgggggggacggggacacggacgcctgcaggtgcacccccacggggggatggggacacggacgcctgcaggtgcaccccacggggaggacggggacacggacgcctgcaggtgcacccccacgggggggacggtgacacggacgcctgcaggtgcacccccacgggaggacggggacacggacgcctgcaggtgcacccccacaggagaacggggacatggatgcctgaacgtgcactcccacagggaggacggggacatggacacctgcaggtgcacacccacagggaggacggggacatggacgcctgcaggtgcacccccatggggaggacggggacacggatgcctgcaggtgcacccccatggggaggacggggacacagacacctgcaggtgcactcccacgggggggatggggacacagacgcctgcaggtgcactcccacgggggggacggggacatggacgcctgcaggtgcacccccatgggggggacggggacacagacgcctgcaggtgcacccccggggggaggatgggctccccttctccctctgttgtcccagagacagctctgccaaaagcttccgtgtcctgcgctttcccagacacagcttttaaaccaggatgcagtaacctggagccagtgtaggtcaggtgcagatgcccagggcacccacagccttcatgcagaaaccccctgctttcagcaaaacaactaagatgctggcaggtgccaggagggggcaccgggaggaccctcaggcaggggtttcctaaatctgcagagccccggaggcatggcaaggcggagggtggccagtgtgcagagcccacacacagagacagggccccgaacctgggggagggacctgattcccgccttcggcccttacctgacctccctcgttaaaggggcccacgtgggagaaccacgctcgcgagcagaaccaggtgggcatgatcaccgtggggccatttgaggtgaaaacctagaagcaattaacgttgacagagttagcggaaaagaacagcttgtcacaaacaacctgcagtttatttccacaaagtgtcacgagaaagtgacagatgaatccgtgtcccttctccacagggtcagggcctcaagagacttcaccacggggccgacgtgtcccttctccacagggacggggctcaaggggcttcatgacgtggctgacgtgtcccttctccagtgctgtgatcatcactcactgtagccttgacctcctcaagcaatcctcctatctcagcctcccaggtagctgggaccacaggcgtgtgccaccacacctggctgatttttactttttttttttttttgtagagatgtttgtcactctgttgctcaggctgacctcaaacccctggcctcaagcgatcctcccacctgaacctcccaagcagctaggactataggcgcacaccaccgtgcctggctattttcttacatttcttttgtagagatggggtctcactacactgctcaggctggtcttaaactcccggcctcaagcgatcctcccagctcagcctcccaaagtgctgggattacaggtgtgagccatcatgcctggctcaacggagattctaaaatgtatatagaaacacaaaggacctaggagagccagcacaattttgaaaaccatgaacaaagttgaagtttcatgactgtatttcaagatttactacaaagctatggtgatcaaggttgattggtatcagcttatgggcagacagacaaacggaacagaacagagaccagaagcagagccgcctggctggggtttgatgtttgctgaagacatcaggggcgtcagtggtggaaatgagagatggcgctggaaccactggtgtccttacaaaccatggccctcaacccttgcctcaggctccaaacacaaagccccagcctcagaccggacctcagtgagctgaacacaaaagaggcaacgagctcatccagggagaacattcgtgattatggggtaggcaaaggtttctcaggtaagaagaggcacaaatcacagcagaagacatggataaaccagatgccaccaaagtcaaatatttggttctttgaaagatcctgcaaagaaaacgaaaagataatccaggctgggacaaaacatttgcaataagtgcgtttcactgaggatgtacgttcggcgaacactaagtaccctcagcacccattaataagaagacaggcaatgagttaaagatgggagaagggctgaaaacacttcctcagacgtaaattagtcaggtcgtgaaaacgtgctctatgtgactagtcatcagggaaatgagttttcggtagggaagtccacctaacggcctcatctgaactttgcatctgcaaagaccttgtttccaaacaacgcccacattctgagattgggggtgaggacaccaacatatcattttggggggacaccatggagcccacgacattttcacttcttgggtggctgaagtgatgttttcctataactgacactgagattacgccagcatctgtacgttcctggaggtgctgtgtgtgtgaacacgcaggtcaggcagagacacaatggctgagaaccatcgtgtaacacagcctcgtctcactgtggatccctttgaagcctaaagactttctgcttgtcgtccatcctgaggaaggtcgctggttaagacaagtcctcatcagcacagtggccctcacctggggctgatttgtccccaggaacatttgtttggagacattcggggctgtcacactgcgggggtgggggtgctacgtgcatctggttgcagattccagagacagagaaataaaattcgaactgcaatgaaataccattgcaccctctaggactgttacaattttaaaaactgaaaataaggcacagtgactcacacctgtaatcccagcactttgggagtccgaggcgggagaatcgcttgagcccaggactctgagaccagcctgggcaactctacaaataataataataataataaagtagctgggcatggtgatgctcccctgtaggcccagctactcaggaggctgaggtgggaggatcctttgagctccggaagtcaagggtgcagtgagctgtgatcgcaccacagcactcactccagcctgggcgacagagggagaccctgtctcttaaaatataaaaagtaaaaataaaaataaacactgacagtaccaagtaaaaatcttacataacgctgaagggaaggaaaaacagtataaacactttgcagagcaggcaggctcttagagagttaaacacagacttccacgcagccagccgttccagtcctagacatttacccaagaaaaatgcaaacacacgtccatccggcaccatccatgtgtgttcacggcagccccagcacccgtccccgtgtgttcacggcagtcccagcaccgtccccgtgtgtgttcacggcagctccacgcacagcagccccagactggaggcccccaaatgtccgtcaacagtgaatggataagccctgtggtgcccgtaccacgagtccagtggagccctcaccagcaaccaagggaacaaactgccggtcagggcagcacagatgtctgtcggcaacagggaagggaggcagtcaccagtgtgcacggtgcacagatgtctgtcagcaacagggaagggaggccagtcaccagtgtgcacggtgcacagatgtctgtcagcaacagggaagggaggccagtcaccagtgtgcacggtgcacagatgtctgtcggcaacagggaagggaggcagtcaccagtgtgcacagtgtgaccccacttacacaaaaccctaaaaagtgggaacctaacctaacctgcagggacagacgtcgcatctgtggacgcctaaggctgagggtgcctgggcctgactgcaaaggcatagccttaaaatttgtcttgttggccgggcgcggtggctcacgtctgtaatcccagcacttttggaggctgaggcgggcggatcacttgaggtcgggagttcgagaccagcttgaccaacatggagaaaccccgtctttactaaaaatacaaaattagccaggcatggtggcacatgcctgtaatcccagcactttgggaggctgaggtgggcggatcacctgaggtcagaagtttgagaccagcctggccaatgtggtgaaaccccatctctactgaaaatataaaaattagctgggcgtggtggcaggtgcctgtagtcccagctactctggaggctgaggcaggagaatcgcttgaacccaggaggcggaggttgcagtgagccaagattgtcattgcactataacctgggtaacagagcaagactccatttcaggaaaaaaaaaaaaaaagaaaagaaaatttattttgttttgttttgagacagagtctcgctctgtcgcccaggctggagtgcagtggcgcgatctcagctcactgcaacctctgcctcccgcattcaagcgattcttgtgcctcggccatcggagtagctgggactacaggtgtgcaccaccacgcctggctgatttttgtattttagtagggacagggtttcgctacattgcccagggctgatttttgtatttttagtagggacagggtttcgctacgttgcccaggctggtcttgaactcctggcctcaggtgatccacctgcctcggcctcccaaagtgctgggattacaggcgtgagccactgccccggcctaagtaaaaattttaaagcccagcgtggtggtgcacgcgccagtggtcccagcagagaggctgaggtgggaattcgagcctcgcctgaggccaggagtttgaggctacagtatgctgtgcttacacctgtcaacagccactgcacaccagcctgggcaacatagcaagaccccatcttttaaattttttttttatacagagtcttgctgttacccaggctggaatgcagtggcgtgatcacagctcactgcagcctcaacctccccggctcaagcgctcctcctgcctcagcctcctgagaagatgggactacaggtgtggaccagcacaccttgctaatttttgtattttttgttgagatggggtttcaccatattgcccaggctggtcttgaactcctgagctcaagtgatccacccaccttggcctcccaaagttgtgggactctgggtgtgagtcaccgtgcctggccaaaaattaaaaaaaaaagtctttgctaccaccaaggaaactctcagaacgaacattttaaagtgaaataacgcagttctatgggataacttcgagcaacctacgtttcgcacatcaaagctttggtgcttctgcgtcgtgacaggtgggtgcctgtcacacagggtgccccctgggacatcaggaagagccccgagggggtcctggaagccaggccagccaaggccacagcacctggtgccagttccaggcagggggcttggcacatccgtgaataccccacgggccccgaggccccctgagaggctgcagtttccagcaaatgtgaaacatctgcccggacaaatacagccttccctcaaccctcagaaaaacggatttcacgattacaaagcaaccatttagcttcctgttctcaacttttgcttgctgaaaaatccagaggcattttctggcaggttgactctgcagccagacacctggagcttctgccgtttgcacggtggtgaggacgacctgagaaaacaaacacaggtcctccccacccagcgtggccgcgacctccgcacccggcgtggccgcgacctccgcacccggcgtggccgcgacctccgcacccggcgtggccgcgacctccccacccggcgtggccgcgacctccgcacccggtgtggccgcgacctccgcacccagcgtggccgtgatgcgaggcctctgcacacggtggctgtgccctggtcacgtggccgaagccctggagctgtggcaggtcctccgtgggctgtgagtgtgaaatacacatgacattctggagacttggtataggaaaaagaatgtaaaatgtcactgataggacatttggctcatgcttctggttggggtatgtccaagaccgggcagctgcctttgcggggggcctcaggctgctttaacccgggtggagagcggaaggcagtggtgtacgcagagagcatgtggcaagggaggacgcaggagagaaaccgaggcagccgggtccgttccacaggtcggcgtcgtggggcgcagtgcgttcctgcgagggctcactcagcgctgtgggaggcattcatccgtgcacaaggggtcccctcgagaccccagcacctcccacacagccacgctgggggtcaaatttcaacgtttcacggggacaaaccacatccaaaccacggcaattatatccaggccggtctgtgctcacgggacgtttctatcggacagaattacgcatctgtctgcaaaacagctcaatccattctttagtgacaacgatccagaaacaagagcataaggacgcgcacagacaccgtgaggacggagcagggacacgggctccgccagctccagggaggggctcagtcagcacagagcactaggggctgcacctgaactgccaggcgcccggcgagtcctccaagcatgggcaagcgctggggtgggggcagctccgtggcagcgactggggccagccacgcgccgtctcctccctggggcctccgagtgggaaaccaaggcgaggaccagcagaaagaaaggctgggaaggaggcgtgggggctactgtgccaaccacaccacactcataggggccagaaggacccggtactgaccacaccacaccacaggggccagaaggacctggtgccgaccacaccacaccacaggggccagaaggacctggtgcccaccacaccacaccacaggggccagaaggacctggtgccgaccacaccacaccacaggggccagaaggacctggtgccgaccacaccacaccacaggggccagaaggacctggtgcccaccacaccacaccacaggggccagaaggacctggtgccgaccacaccacaccacaggggccagaaggacctggtgccgaccacaccacaccacaggggccagaaggacctggtgccgaccacaccacaccacaggggccagaaggacctggtgccgaccacaccacaccacaggggccagaaggacctggtgccgaccacaccacaccacaggggctagaaggacctggtgccgaccacaccacaccacaggggctagaaggacctggtgccgacacaccacaccatgggccagaaggacctggtgccgaccacaccacaccacaggggatagaaggacctggtactgaccacaccacaccacgggccagaaggacctggtgccgacacaccacaccatgggccagaaggacctggtgccgaccacaccacactcataggggccagaaggacccggtactgaccacaccacaccacaggggccagaaggacctggtactgaccacaccacaccacaggggccagaaggacctggtactgaccacaccacaccacaggggatagaaggacccagtactgaccacaccacaccacaggggctagaaggacctggtgccgaccacagcacaccacaggggctagaaggacctggtgctgaccacaccacaccacaggggctagaaggacctggtgccgacacaccacaccatgggccagaaggacctggtgccgaccacaccacaccacaggggatagaaggacctggtactgaccacaccacaccacgggccagaaggacctggtgccgacacaccacaccatgggccagaaggacctggtgcccaccacaccacactcataggggccagaaggacccggtactgaccacaccacaccacaggggccagaaggacctggtactgaccacaccacaccacaggggatagaaggacccagtactgaccacaccacaccacaggggctagaaggacctggtgccgaccacagcacaccacaggggctagaaggacctggtgccgaccacaccacactcataggggccagaaggacccggtactgaccacaccacaccacaggggccagaaggacccggtactgaccacaccacactcataggggccagaaggacctggggctgtgagcggaaggggctggagagttctggaacgcttccccgaaggagggggcccctgtgtcacacacagcacggagctctgatgccttcgtgtgctcccgcggctgccagcctggacagggccatgtgcacagccttggggccaccgcccactcacaagcccaggcctggggctcacacaggacagaaaatggaagcacagacactgtaccgagaccaaaggaaccgaaaggagaaaagggcaaacccacaatgaaagctggagacgccctggtggtctgttaacaggaggacgagtagacacaaagcaaataacgactctgaagattgaaaacacctgtgaccatctgtgggtttttcaatttcatgattgataattgattagagcgaggtaaaatcactgagctatgaaggacaaacttttaaggaaaagaaacacggagatacggaactgataacatttcagtctttcatatagaccaggccggttttcacggtcttcccggggagcagcgctcctgagaatggaaaaggagatgaaaagctttttccagcagcacatgacgcccgggcaggattggagtccggctctcacctggcacctggtccttgggtgtcgtggaggcaggcggggtggggtgggggtggactcagcctcttcctgctcctgggacacaggagggaacctggtgcaaccgaagcctacaccgcgggaaccacacactgagttcggagccggctaagaagttacctgcgtgtagttgtaagcgtcaaacgagcgggcacagagcagccagcacccttgaatcttacgaacagtcggactgggtcccagagaggtgacccaaaggggatggagctcaggggctctcaggcagtggccccacaatggcgctggggctgctaagagatgccttaggattcaactcctctcccgtgtggacaggagagagtggcagagacccaggtgggccccgtgtacctgtgtgttcccaccccgcctgccactgaccagcaagcagcccagccccttgccccatggggcgcgtttcaccgtgggtcgagagggtgtcgtggaccagcactccacgctccatgggcgactgccactgcagtgctgtttctgcccctcggagagttctcctgccccttgggcctccctgcctccagtctgagccggttccaggctgtcctctacggagctggcagaaggtcccacttccactctcctggtcctccctggctcctcatcaaccctcagcaccaagcgtgggccccacaggtttggggaacgcgtgctgactgaggccgcccgggtggccggcgctgacaagctgaccctggacactgtgcgtgacaaccacacaggccccctgaggtgaaggacgagcttggctgaacgctggccgcctcgagcagaggcccagggcccagaggtggctcagtctcagcagaacacagctgccctcaggagctgcccgcaaagcagccagcagattcaggcggggcggagtcagggcggacttggtgcctccccaaggggtcaggcagagctgcgtcccctcgtgagggacaggagtgaggcaggaggctgccagctgcctgttcccatcctgatcatatttgcggagtgagctcaggctgtaaatgaccctctgactgcttgtgtgtggggatccacccagggtctaatcagcacattcaccccccacagcgggtgtccctggccccacatcaaggctgagggtgtggggggccacattcccttccagtctgaactggaccctgggggtgagctgggtcccccccacagcttggaacagcggcaggaggcacaggcaggctgggaaccagtgtctgcacggcgcagacaggcacaggtggaagcaggcaaagaacgtggggctgggacagagcccgactccatcctcccaggggccggaggccacttatggggaaccagggccccaggacagagccggactccatcctcccagggaccggaggccactatggagagtcagggccccgggacagagccggactccatcctcccaggggccggaggccacttatggggaaccagggccccaggacagagcccgactccatcctcccagggaccagaggccactatggagagtcagggccccgggacagagccggactccatcctcccaggggccggaggccacttatggggaacgagggccccgggacagagccggactccatcctcccagggaccagaggccactatggagagtcagggccccgggacagagccggactccatcctcccaggggccggaggccacttatggggaacgagggccccgggacagagccggactccatcctcccagggaccagaggccactatggagagtcagggccccgggacagagccggactccatcctcccagggaccagaggccactatggagagtcagggccccgggacagagccggactccatcctcccaggggctggaggccacttatggggaacgagggccccgggacagagccgaactccatcctcccagggaccagaggccactatggagagtcagggccccgggacagagccggactccatcctcccagggaccagaggccactatggagagtcagggccccgggacagagccggactccatcctcccagggaccagaggccactatggagagtcagggccccgggacagagccggactccatcctcccagggaccagaggccactatggagagtcagggccccgggacagagccggactccatcctcccagggaccagaggccactatggggaacgagggccccgggacagagccggactccatcctcccaggggccggaggccacttatggggaaacagggccccaggacagagcccgactccatcctcccaggggccggaggccacttatggggaacgagggccccgggacagagccagactccatcctcccagggaccagaggccactatggagagtcagggccccgggacagagccggactccatcctcccaggggctggaggccacttatggggaacgagggccccgggacagagccggactccatcctcccaggggctggaggccacttatggggaaacagggccccaggacagagcccgactccatcctcccaggggccggaggccacttatggggaacgagggccccgggacagagccagactccatcctcccagggaccagaggccactatggagagtcagggccccgggacagagccggactccatcctcccagggaccagaggccacttatggggaaacagggccccaggacagagccggattccatcctcccaggggctggaggccacttatggggaacgagggccccgggacagagccggactccatcctcccagggaccagaggccactatggagagtcagggccccgggacagagccggactccatcctcccagggaccagaggccactatggagagtcagggccccgggacagagccggactccatcctcccaggggccagaggccacttatggggaaacagggccccaggacagagcccgactccatcctcccaggggccggaggccacttatggggaacaagggccccgggacagagccggactccatcctcccagggaccagaggccactatggagagtcagggccccgggacagagccggactccatcctcccagggaccagaggccactatggagagtcagggccccgggacagagccggactccatcctcccagggaccagaggccactatggagagtcagggccccgggacagagccggactccatcctcccagggaccagaggccactatggagagtcagggccccgggacagagccgaactccatcctcccagggaccagaggccactatggagagtcagggccccgggacagagccggattccatcctcccaggggctggaggccacttatggggaacgagggccccgggacagagccgaactccatcctcccaggggccggaggccaccgtcagggagtcagggccccaggtggccccaggcagggaggccggaagacagtcctgctgacccgcagtgcccacctcgaaggccacggcaggggagaaacttaacgtaagccaaacgctggcccactgaacaaagggaggcagaggaacactgggaaacgtattctctattagaaggaaagatcgaggacacccatgaacggaggcccgaaagcaagaggaaaggggcttacaggccgcgaagtcggaacctgcgtgaataaggacagctgcggcgccgccccgacacggaccgtgtttgcatccgtgactttaaaacggcttgaggatggaaccccatgaacagtaacaccccccacccaccggagtattcaggagtgactgaggtcgggtctggggttgcttcgaaagactccgggtgctcagtgttgggaggggggtgagtaccgttatgtgacagtggtctctaccccttggtgtacttaacattttcaacaaaaaaaaacttttctttgtttaaaagcactcatgggtatctggaacgcagctacagtggggagcgagcaacgccccaatcctcaggctctccggggggtctggggtgcaactcgaaacccaccgctggtgactcccacttctggtcaccgtgaaagagctggaccactctccctcctcagacaactagaaaatcacacagaatctgtgaaatggaggtgttcaggcactggacgcagggcaggacggtgacgcccgagaggagaagccggctgattccagtctgggaccgaggggggtggaacgaggcctcagaacagcctcgttttcacgctgcccatgtcacacacgagcatggaaacgtacgctctagtacttcctgcggtttctgtcttctcatcaccggggtttggtgcccagcatttccgctccatcccgaccgatgtgcactcctgttttccgtttcccaagctcctcctgccctggggcttggctggaggttcccacaggtggtggcagtgggtggtcaccatgcgacccgggccacctctggttacgtggagggcatcaggtgttttccgttgctccccgagtaattccgtaattttaaaaaagcacgtgctgtttgtacctaaaatcctttatttctataaaaacaagccacgcgtggcctttcctttcccggctcccagggctgaactcccctgcctcctcctggggtcccttctgcttctcccccaggctgcgagtctgtgagtcccatctcacaccttcctcagtttgcttcctaattttagggactggctccagcaaagccccgaggaaggttttatcggagatggatatgttgaatctgaatatgaaaaggttgttatatctctgcacgtgattgacactttggtgaggcataaaattcttagttcaaaatcctttctgtgagaaatctgaaactagtgtcctggtgtctcctggattccgctgctgtgagtgaggaattccgggctcttcgattcctgctccttggtgttcctccctctgactgtgcttgggctctgaagcatcccgaccgtgaacccggatgcaggtctcatttcctgcacgcaacaccaggtgagcccttctaatcaggtcactcgtacgttttggttctaggaaatttttctgtatttttcttagttaatttacttccttctattttttaaaaaatctgattttgctatgttggaccagttgaagctgggagtgaagtttctcagaatgcccttctcagtacgaatccagttgagtctagagacaaggaggaagacgccattgctcccacatgtcaagggcctggtgagtcttctccacaaccccagcaatcagcagcagccccacccacttcccaataatccatgggccaaagaggaagtctcaaaagaaatctaaaatgtattgaccaaaatgaaaatggaagtacattgaaaacctgtacaatgcggctgatgtagtatgtaaagggaagttgctggctctacatgcttacattaaaagagaagagaggtctgaggacaaaaaactcagcttccacattagaaaaaccacaaaggaagagcaaaatgacaccccaaagcaagcagaaaaaagaaacaatcaggcagaaatgaatgaaattgaaaacagaaaaacaatagaggaaagtcaaaccaagagctggctctttgaagagattaataaaatagataataaaccaagactgataaaaaagtgagaggacccaaataactaatacctaaaatgaaaggggatattactacaggcctcacagatactaaacgcatcacagagaatactatcaaataaccctaaacacacaaactggataatttagagcaagtggatcaattcctcaaaaatcgcaagctgccagagctgtaagttgcattataccaagacgaaatagagtctgaacagtcctgtaacttttaggtatacgtttctgtaagttagcagtggacaattagaaaccaaaattaaacacacagtagcatgtataattgcctaaaacaaatacttaggtataaatctaacaaatgtacaggacttgtacactaaaaactacaacatgtgaatgaaggaaatcgaggaaaatttcagtggaggacgggacaaatagtgaattggaaaactctatagtaaagatgtcaactctatacaaattgatttgtaagtttaactcacttgctatgaaaatctcagctagattctttgtaaatataggcaagctgattctaaaatttatatacagaggcagaaatactagaatagccaaaaacaagttagaggaaacacattaaccaattttaagacctggtcatcaagatgatgttactggtggagggacagacacacaggtcaatggactagaacaaagtccaggaacagacagacccacactctgtggtcagatggttttttgacaaggcccagaagcaaccagtggaagaaggattttcagcaaaatcagtgtagaaacatgtgggcattcataagccaaaacgaacaaacaaaacccttgatttaaacctcacactaactcagcctacaaggacatagctctaaatgtaaaatgtaaaactataaaacttttagaagaaaatccttatgtcctagggttaggtgaagtagtcttgggtgttgacactcaaagcatattaaaaaaatacatcaaaaaatatcaattaattggacttcatcaaaattagaaacttttgttctgtgaaaaattctacgtggatgaaaagggaagcccccacgtagaaaaggctgtttttcctctgctctcccaccacaatgtgcgggtctgttctccatacaccaagcaaaccatcagttctggagtagacaccagtcaggcatcctctaactcaatcccaacaccatctacctggagacagcctcagacccccccaggtgagggctcagtccccgtgaccccttctcttcaacttccaatgccaactgaagtcccaggctgtttgaccctccagctataaatcggggttcccacaacctcttccttggattcagttaattttctagagggacccacagaattcagggaaacacttacttacacctaccagtttattaaaaagaatgttattcaaggatacagatgaagagatgacggggaaaggtatgggggaagtggtgtagacggtctaggtcctcttggggcccaacaccctccaggaccctgcatgtgttcagccatctggaagtccccgaggctcgtccctttgggttactgtacgagttcatgatgtaggtgtggttgcgtagctcgtgggccattgctgatcaccctaagcctcaacccctttccctccccggaggtttgggggtggggctcaaagttccaaccctctgagcacatggctggttcccctggcaaccagcccccctcatcctgcggtatctaggggtgttccaaaaatgcctcattaacataaactcaggtgtgtttgaaggaacttgtaaacaaaagactcttccagctttatctttcagaatttacttcagaaaccaaggacaaaaggctcaatactttaaaagatattcttattgctctagttacttaggaaataattacagggggtcagagtcagggatcctggataaaacgccaaatccatgatcctagttccagccacagatcaggaggaaatgaggtaggccctttagcaatacagggtttagggtgacccactccccatgcagccgaaaatccacgtataaccttggactcccccaaaacttaagcactgagaaacaaaagtggctcagaggagtcggcgccacgcgaggtattcaccagccccagcggagctgcgagggtgagacctgcatcatgcctcccccgccgcacccatgtggggccaactgtttaaaggcatttgtcttcctttccttccctgttgtttccaggctggctgaaaaatcacaagaaatgttacacaagttagacaatgtgaccttcacccattatcttcatgctcctggaatctgtgatgcaaagaaccatctacagccagtcaatagcttatgttattttaatgaaccagtgtgggaacttgccccttctttctttctttcaaacccactgtaactgctgctaactggagcatatgttcggagccacctgaatctacgtcccccaggatgccgtcctcacacgtggcccaaataaaccctccacatgtactaactttgcctcagcatctttctttaggttgacatggctgagagcctactgttgaccggatgccttaccaataacataaacaggtgatcaacattgtcctgtacattctgtacgttttgtgtattatataccgtattcttacaatgaagtaagctggagaaaagaaagtgttactaagaaaatcataaggaagagaaaacacattgactattcattaaatggaagtggatcatcacaaaggcctccaaccttctcacctccgtggtgatgggccgagcgggtggaggagcctccatctttctcacctccgtggtgatgggccaagcgggtggaggagcctccatccttctcacctccatggtgatgggccaagcgggtggaggagcctccatccttctcacctctgtggtgatgggccgagcgggtggaggagcctccatccttctcacctctgtggtgatgggccgagcgggccgaggaaggagggttcttgctgtcccgggtgtcagttcatctgcgacttttttcaaattgtcataaatctccaaaacattttccaatatatttatttttaaaactcgtgtgtaagtggactcccagttcacactcatgttattcaaggatcaaatgtacttgcaagttttatctccaatggaggtcttatgtccagaagaaaacgctcagattcaacaacaaaaccagtaatgtaattggaaaatgagcccacaaaagggcctcacggagatcctcttccctcccgccacgtgaatgggatcagagcccacgaaagggcctcacagagagccttgtccctcccaccacgtgaggacacggtgagaaccaggaatcaggcctcacagagaccaaatctggtgccttgatctgggactccagcttccaaaacggtggaaacagatgtttgtagtttataagccacccagtttatggtatttttgtcctagcagcctggacagactaggacaggtcaggagaaaatgtgactctaaaggcagtttctccgggtgatgggaccctcgatgtcctgattgtcgtgttgatctggaaacatggggacgtctcacagaactccctccaccaagaataagtgaactgcatggggtctgtggctgccacatcgtatccacgtggagtttctggtttgggtccttgttctctggttatataagatgttagcagctgggggtggaggagatggggggtacataggaactctctgtgctattaatatttctgcaattttttggctgggcgcagtggctcacacctgtaatcccagcacttcgggaggccgaggcagatggatcacctgaggccaggagttcgagaccagcctgcccaacatgctgaaacctggtctctacaaaaacacgaaaattagccaggcatgatggcacgtggctgtaatcccagctactcgggaggctggggcaggagaattgcttgaacccagaaggcggaggttgcagtgagccgagatcacgccattgcactccagtctgggcgacagagcgagactccatctcaaaatatatatatgttttagttctgcaatttttatgtgagtctaaaattatttcaaaatacaaccttttttaattgggtagactttgtcaaaatgactctaccatcctggggggaagcagtttttcatgcacacttcgccagaagcctgacctccacgtggactcagtgtgacacattctcagagtccattttaaacactcgggcacgcgttagagacacacattcccagccccacacagaaccatgagatcagaaactacgaagagtgggtctcatttttctcacttctcattcctgccgacctgtggcaggtgccgttcagatgctgggggaaggaaaggaacagctcagcaatggtgacaggatgggcgccgccaggaacagtcgcacagcagatgctccgtgggggcagcggctcccgttatgcagccctagagcgggcaggggcaccaggcagggcaggggccccggggcggaggagggtgtccaagtgctgaggactgaactgtgtgcctcagattaacgggttgaagccctaactcccaatgtgactgtatttggagatgggcttttaaggaggtagctaaggttacgtgagtcccaaaggtggggccctggactgttgtccttataagaagaggaagagacaccagcagtgagcacacagggagaggccacatgagcacacagaagagaggccatatgatcacgcaggggagaggccacgtgaggacgtgggggaggggagaggccacgtgagcacacaggagagaggccatatgatcacgcaggggagaggccacgtgagcacacgggggagagatcatgtgagcacatgggggagaggccacgtgaggacgtgggggaggggagaggccacgtgagcacacagaagagaggccatatgatcacgcaggggagaggccacatgaggacgtgggggaggggagaggccacgtgagcacacaggaggccatatgatcacgcaggggagaggccacgtgagcacacgggggagaggccatgtgaggatgtgggggagaggccacgtgagcacacggggagaggccacagaaggacgcagggagaggccacgtgattatgcaggggagaggccatgtgagcacacagggagaggccacaggaggacgcagggagaggccacaggaggatgcagggagagaccacgtgattatgcaggggagaggccacaggaggacgcagggagaggccacaggaggatgcagggagagaccacgtgattatgcaggggagaggccatgtgagcacacagggagaggctacagggtcgtgcagggaaagggtgccatctgcaagccacagagaggcatgaggaggaacccaccctgccagcagcctgagcttggacctccagacccaagaactttaagaacacaaatgtctgttgtttaagctgccctgtctgtagtgttcctttatgggggcctgagctgggacggcggggaagcagggatccccccaggagacgtgcagggcagcaggggtccgcgtcacaccactgtctgccttcccttcttggtgagtgcggcccaccccgggtagctagagcaggagcatgcatctcagccctgtccacttccttcaagctgccaggacctctgagtccccttcgtggccctgctgggaccccctccctcgagtttccagaagggcccaaggcaacctgggaagccgggtggcggttctgcccatgcctcccctttgggcctccctggaatcaggagatgcagccccctggggaagggacagaaggtacaaagagggcctgtctcagacaggggcgctttcaggcaggcaccaccccaggccactggcatagacaactttcacctttcggtttgtttagaattagcagtgttaattttacacagctctgatttaacgttgtatgtggtgactatcccatcaggcatgtcaaacagacacatcaaaagtcaaatcaaaatatgccacttcccacatcacaaatgtgactcagacaatgaacataaaacttgacttggtggctgagttaccttattaaaatagttggaagtgatttctgttaatgtaacagctgagaaatggtttaaatgagatctcttctttgaacttcacacgttaattcccactaacttgctaaaggaaaattctatctaagaggacctacctgatttatttgttatgactgggtcttcatgttacccctcgattcggaacatgaatttctggttcaaactgtgcctcctccacttcaattacatccttggtgtttagtggcaccgttttcacgtgactcctgctacccaagaatcaaaagcagcagaagcccgtgctcagcaggtcctgaggctgcggcgaccccacgcctcccactgccctaatacgcgggactgaatctccaaagaggaaaaccaaaatcaggagcccagggttgatcggaggccaaaagcttccacaatgaatatggaatttttacttcccagttaagaagaagagaggccttacgaggttttccatttccctgccccgtgagacagctggcattctttaagaaaagcattaaaaatcatcgtgtattccaggaaagtgtgtgtccctgaagaagtggcacatcccagaatctctgaactctggtgatgggaggacccaggagggctcctcaggagggtccgggcctgttctctgtgcactccaagtgctgagtgcctgggatcaaagccctcatgctgtcttcaggagccctgctcagaaacctgacaccgggccaggagctcagggcgagggactctgcacaccctttcaacgtgggggaccctctccgcttcccagccaggaagctgcaccagacactcacaaaggtgactttgtgcccgtgaactcggctgcagcccacagtttgggcttgctgccgccggtgcagacaggaaatagctgctctgcggcagcccgaccccgtggccacagagcagcctctgttccttggtaatcgtcaacatctggcaggcacctccacgcccctccgcccccaccatacgctgctggctggaggctcccgtgcaatgccaggtgtgttgggagaggacaggctatacccacaagctgggctggaagtaaggaaatcgctttaaaagcaggaaaacaaattcgcttccccacgctttaaccactggtacctgtaagaggccatcaatggaatattcatcttctccaaatgtaaaaagtaaatctaaatggaagaaggtctttttcttcccccgcttttccgcgtgacacaggatgttatggaatagaacttgaaagctggtgaagcagatttgatgcggaaagcaaagctcatcaaggaaccctgatcactgtgaactcacttaatggaatagttgatgccgtcatcataaacagcaccaacgttagaagccagtgatccttatactaaggtttcagttttactgcagatcaaaattacattttcaaaattcagaaagcatttcattacatggtgcgatcacaagaaatccgtaatgttggggcgtattactcccacaacctcgctattagaggtggacgtcctggcacccctcatggggtgcagagcacctttctcctcttggactgaggtgtgcagctggctgcccccgctcctccctgtcccactaacctgaccatacccccacgaggcagagtgcctttctcctgccctggagtggggctgacacagtctcgaacaccataatccaggatgttgaaatcctgaaagatcaaaatccctaaagtctaaaatcccccaaatcacaatcctgaaaaatgtagttcttgaaaaaataattttaaaaattctttaccccatttaccctaatatagttattacactttgcatgcctttatcaaaatatctcatgtgctccataattatatacacctactatgtgtccataaaaatttaaaaaattctttatctcaaatgttagcgagaaaaaggaaaaaataaataatgatttgaaagacatttgcttacaattttaaaaagaagacttatttgagaaatgtacaaaaacatgacagcatgcttcataggccactttacacaataaaacagacaatactaacacacacatttttacaagcataaacactcaagtacactaatgacagtcacatgggtataacggttaatgagcagatgaaccgtattcataaagaaatagctcctgtcatctgaaatattctgttggacaacctaagtctttggacaagatccatcaaaaaccatgatggttgtatatgtgtggttttatttctgagatctctattctgttctgttggcctatgtgtctgtttttgtaccagtaccatgctgttttggttactgtagacttgtagtatagtttgaagtcagggagtgtgatgtctccagctttgttctttttgcttaggactgtcttggttatacaggctctttttcagttctacatgaattttaaagtagttttttctaattctgtgaggaatgtcaatggtaatttaatgggaatagcattgaatctataagttactttgggcagtatggccattttcacgatattgattcttcctatccatgagcatggaatatttttccatttgtttgtgtcctctcttatttccttgagcagtggtttgtagttctccttgaagaggtccttcacctcccttgttagctgtattcctaggtattttattctctttgtagcaattgtgaatggaagttcattcatgatttagctctctgcttgtctactgttggtgtataggaatgcttgtgatttttgcacattgattttgtatcctgagactttgctgaagttgcttatcagcttaaggagcttttgggctaagatgatgaagttttctaaatataggatcatgttgtctgcaaacagagcttcgacaaacctgacaaaaacaagtaatggggaaaggattccctgtttaataaatggtgcagggaaaactggctagccatatgcagaaaactgaaactggagcccttctttacaccttatacaaaaattaactcaagatggattaaagacttaaacgtaaaacccaaaactacaaaaaccctacaagaaactctaggcaataccattcgggacataggcatgggaaaatattacatgacaaaaacatcaaaagcaattacaacaaaagcaaaattgacaaatgggacctaattaaactaaagagcttctgcacagcaaaagaaactacaccatcagagtgaacagacaagctatggaatgggggaaaatttttgcaatctgtccatctgacaaaggtctaatatctggaatctacaaggaacttaactttacaagaaaaaacaaacaacccatcaaaaagtgggcaaaggacatgaacagacacttctcaaaagaagacatttaggcagcaacaaacatatgataaaaagctcaacatcactgatcatcagagaattgaaaaccaaaaccacaatgagataccacctcaagccagtcagaatggcgattttttaaaaatcaagaaacaacagatgctggcaaggctgtggagaagtagggatgcttttacactgttggtgggaatgtaaattagtccaaccattgtgtaagacagtgtggtgattcctcaaggatctacaaccagaaatgccatttgacccagcaatcctactactggtacatacccaaaggaatacagatcattctattataaaggtacatgcacgcgtatgttcactgcagcaccattcacaatagcaaagacatgtaatcaacccaaatgcccatcaatgatagactggataaagaaaatgtggtataccatggaatattatgtagtcataaaaatgaatgagatcatgtactttgcagggacatagatggaggtggaagccattatcctcagcaaaccaaaacaggaacagaaacccaaacactgcatgttctcactcataagtgggagctgaacaatgagaacatatggacacggggggaacaacacacactacggcctgttgtggaggtgggggaagggagggcatcaggaaaaatagctaatgcatgcagggcttaatacctaggtggtgggttgatgggtgcagcaaaccaccatggcacaggtttgcctatgtaacaaatgtaccccccattctgcacatgtattctggaactaaaaaaaaaaaaaaaaaaaaagatggttaccaccacatacacattcaccccaaaagccaagatctcaagaaatttcatctttcataaatgcagatgtacaaaaaggacatcttttcatttactaaggaagtttcaacgtttttacggacatgcacaatgcttacaaagtcaacattgttgatagtgcacctttgtggagtcgaatttgcaaaaagatgcataaatgaattacagctctgtaaaagaaatgatgcaaaggtgaaacacaagcatagtgattgtaaaacataatgctgacaatttaaaatagaaaaaacaaacaaaaatagaaaaaattacaaacaataaaaaactaaacagaaaatctgatttatgaaaaagtataccacaggagtatattacgggcaattgcacagaaacagtccctaagagctggctgactttcacaatcattaagtgtattttgaaggtttgcatcacaatggataaccgctttcttttaagacatggcttccttggagaatgagctcacattcatcttctctgcggcactgctctttttgaaactcctctgtgatttgacacacaccaggataagccttctccttacattttcccgtcttccatgctgtgcttctgtgttgttctgggtacgtggatatgcattctgcatgccctcttgtacagaccccaggtttaatacaaaccatactggtgatggaacagaacactgttgtgtaagtgtcttcttatcctactatacacacaattattttgaagcagtcagtcactttgctggtttctttgggcaaatgtggccatgattccctaaaagctctcagtgtgtgatcagctgggaggaacgccaacgcaggcagtgtcatcagcaggaacgccaacacaggcaagagactcgccatcgtaggcaagagactcaactcatttttaaacggaagtttctgtcactgccatatcacgtggccaagccactcatctggattttgcaccaaatgcattggactgaatggaaaaaacaaactttattggtaacaacttgaaattcacttacagaagacttgatggcacctaattccaaatccatcattatagtttggggattcagttagatgctaggaattttagatttggggattttgatctttagggatttcaaatttcagaattacagcactggagattctgtcttccaggactgtgacaggcactggttgaagccctaaccccctatttgaggtattgtggaaatggggcctctgggagatgattagatttcacgtgagggtggggctctactgggatcagtgtctttataataagagacaccacagagcctgctctctctccctctgtctctgccatatcagggttcagagaaaaggtgggtgtctgcaagccaggaagagccacatcagaaagcaagccctgccaggtcttgatctaagactttccagcttccagaattgtgagaaaataaattctgttgtttaagccacctagcctctggcattttgttatggcagcctgagctgattaagataataatccagatcgtagatgaaaattaactaaaaaatggattgtagatctgtatgtaaaacccaaaactatacactttttagaagaaaacaggaggaaaacttttgtgaactgggttagccaaagatttcttagatacaacatcaaaaccacatccatgggcggggagtggggagcaaggtggctgatatggtttggctgtgtccctacccaaatctcatcttgaattgtactcccataattcccacgtgttgtgggaaggacccagtgggagataactgaatcatgagggcagtttcccccatactgttctcatggtagtgaataagtctcacaagatctgatggttttacatggggtttccgatttcgcttctctctcattctctctttgcctgtcgccatccacgtaagcttggtcctccttgccttctgccatgattgtgaggcctccccagccaagtggaatgcagatgcagcttagatcgcaacactcaagtcctactgactacctggaaagcctttccaagaaggacaggtacgaacaaacatagactgcaaagactatatgacaaatacctatctctgcaatgcccagacacagatgaacatccataagcatcaagaccatcctggaaaacatgaccttaccaaatgaactaaatgaggcaccagggaccaatcctggagaaacagagatatgtgacctttcagtcagagaattcaaagtagttgttctgaggaaactcagagaaattcaagataacacagaaggtattcggaattctatttaaaaaaattaacaaagagattaaaataattaaaaagaagcagaaattctggagctgaaaaatgcagttgacatactaaagaatgaatcagaactttttaatagcagaattgatcaagcagaagaattagtgagcttgaagaaaggctatttgaaaatacatagtcagagaagacaaaataaaaaagaataaacaataatgaagcatgcctacaatatctagaaaatcacctcaaaagggcaaatctaagagttattggccctaaaaaggaggtagagagataggggtagaaaatttattcaaagggataataacttcccaaacctagagaaagctatcaatatccaagaataaagaggttatagaacaccaagcagatttaacccaaagaagactacctcaaggcatttaataatcaaactcctgaaggtcaaggataaagaaaggaccctacaagcagcaagagaaaagaaacaaataacacaatggagctgcaatatgtctggcagcagacttttcggtagaaactttacaggtcagtctttcatgcctaggagaggatggcatgacatatgtaacgtgctgaaggaaaaaacttttacactagaatagtatatccaatgaaaatatccttcaaacatgaaggagagataaagactttcccagacaaacaaaagctgagggatattatcaacaccagacctgtcctacaagaaatgctaaagagagtactttaatcagaaagaaagggatattaatgagcaaaaagaaatcacctgaaggtacaaaactcactgctaatatgagtacacagaaaaacacaaagtattataatgctgtaactgtggtgtgtaaactactcttaagtgaaagactgaacaatgaaccaatcaaaaagaataactataataacttttcaacagatagtacaataagatataaatagaaacaacaaaaagttaaaaagtgggggacaaagttaaggtatagagtttttattagttttctttttgcttgcatgtttgtttatgcaaatagtattaagttgttattagcttaaaataatgggtaataagataatatttgtaagcctggtggtaacctcaaataaaaaatatacaatgaatacacaaaccataaaaagcaagaaatcaaatcatattgccagagaaaatcaccttcactaaaaggaagacatgaaggaaggaaaggaagaggagaataccaaaatacaaccagaaaacaaataacaaaatggcaggagtaagtccttatttatcaatagtaacattaaatgtaagtggattaaattctccaatcaaaagacatagagtggctgaatggattaaaaaacaagacccaatgatctgttgcctacaagaaacacacctggcttctaaagaaacaggcttaaaataaagcagtggaaaaacatactccatgccaatggaaccagaaaagagcaggagtagctatacttatattgagggtctatctcagatgaaatagatttaaagaaaaaaattatgagacaaagaaggtcaccatatgatgataaaaaggtcaactcaagagaatataacagtcataaatatatatgcacccaatattgtagcacccagatatataaagcaaaatattattaaagctaaagagatagaccctcaatataataacatctggagacttcaacaccctcttcaacaccttcaattttcagcactgaacagattttccagacagaaaatcaacaagaaacattggacttaatctgtgctacagaccaaatggacctaatagatatttacaaaatatttcctccattggctgcggagtacacattcttttccgcagcacatggatcatcctcaaggacagatcatttgttaggtcacaaaacaagtcttacaacattaaaaaaaaaaacacctgaaataatatcaagcatctcctctgactactaaaatatctagttttatttaatggactaaaactagaaatcaataagaggaattttggaaactatacaaacaatggtaatttaacaatatgctcctgaatgacaagtgggtcaatgaagaaagtaagaaggaacttaaaacatttcttgaaacaaatgataatggaaacacaacataccaaaacctataggatatagcaaaaacagtactaagaaggaagttttaaatagttataagtgtctacatcaaaaaagaagaaaaccttcaaataaacaacctaacaatgcatcttaagcaactagaaaagcaacaaacccaaaattagtagaagaaaataaataacaaaaatcagagcagaaataaatgaattcaacataaagaaaatacaaaagatcaatgaaacaaaaagttggttctttgaaaagataaacaaaattgataaacttttagccagactaacaaaaaaagagagaacacccaaataaaatcagggatgaaaagagagacattacaactgatactggagaaattcaaagaaattagtggctagtatgagcaagtatacaccaataaattggaaaatctaagggaaaaatttagaaaaattagaaataaatctaggggaagagatctagaaaatctaggaaaaaaaatcaaaattcctagacacatacagcctaccaagactgaaccatgaaaaaatccaaaacctaaatagatcaataacaagtaacagggtcaaagtcataatacaaagtctcctagcaaagaaaagcctgggacccaatggcttcactgctgaaatctaccaaacatttaaagaactaataccaatcctacccaaattattccaaaaaatagaggaggaaggaatacttccaaactcactctacaagaccaattttaccctgataccaaaaccagacaaagacacataaaaaaattaaaactataggccaatatcactgtaaccactgaaatcctcaacaaagtactagcaaaccgaattcaacaacacattaaaaagatcattcatcacgaccaagtgggatttattccagggatgcaaggatagttcaacatatgcaaatcaattaatgtgatacatcatgtcaacagaatagacacaaaaaccatatgatcaattcaattcatgctgaaaaagcatttgataacattcaacatctcttcatgattaaaaatcctaaaaagcaaggtatagaaggaacatcccttaacataataaaagccatatacaaaagatccacaattagtatcatattgaatgaagaaaaactgaaagcctttcctctgagattgggaacatgacaagcatgcctactgtcaccactgttattcaacattgtactgaaagtcctagctaaagcaatcaggcaagagaaataaagggcatccaaattggaaaggaagaagtcaaattctccatgtttgcagatgatataatcttatattttaaaaaaacctaaagactccaccaaacaactattagacctgataaacaaactcagcaaagtttcaggatacaaaatcaacatacaaaagtcagtagcatttctttttctttttttttttttttgagatggagtctcaccctgtcacccaggctggagtgcagtggcatgatcttggctcactgcaacctctgcttcccgggttcaagcaattctcctgcctcagcctcccaagtagctgggattacaggcatgtgccaccacgcctggctaattttgtatattttaagtagagacggggtttcgctatgttaaccaggatgggtctcgatctcctgacctcatgatccacccacctcgccctcccaaagtgctgggattatagatgtgagccactatgtccggccatcagtagcatttctatatgccaacagtgaacaatttgaaaaagaaatcaagaaagtaatctcatttacaatagctacaaataaaataaaatatctaggaattaactaaaataaaagagtgaaagatctctacaatgaaaactataaaacactgatgcaagaaattaaagaagagtaatctcatttacaatagtgataactaaaataaaatgcctaggaattaactcaaccaaaggagtgaaagatctctacgatgaaaactataaaacactgatgcaagaaattaaagaagagtaatctcatttacaacagtgataactaaaataaaattaccaaggaattaactcaaccaaaggagtgaaagatctctatgatgaaaactataaaacactgatgcaagaaattaaagaaggcaccaaaaaaatggaaagatattccaggttcacggattcgaagaacgactattgttaaaatatctatactacccaaagcaatctatagatttaatgcaatccctatcaaaataccaatggcattcttcacaaaaacagaaaacacaggctgggtgcagtggctcatgcctgtaatcccagcactttgggaggccaaggcaggtggatcatgaggtcaggagtttgagaccagccctggccaatatggtgaaaccccctctccattaaaaatacaaaattagctgggtatggtggtgcgcacctgtagtcccagctgctcagcaagctgaggcaggagaatcactcgaaccctggaggcagaggttgcagtgagccgagaacgcgcgactgcactccagcctggatgacagagcgagactctgcctcaaaaaaaaaaaaaaaaatagaaaacacaaccctaaaatttatatgaaaccacagaagaaccagaatagccccagctatcctaagcaagaggaacaaaattggaggaatcacattacctgacttagactacagagctatagcaatcaaaacagcatggtacttgcataaaaacagacacatagatccgtggaacagaatagagaacccatagataaatcaatatatctacagtgaactcatttttgacaaacatgccaagaacttacattggggaagagatggtctcttcaataaatggtgttgggaaaactggatatccatatgcaaaagaatgaaattagacccctatctttcaccatatgcaaaaatcaaatcaaaatggattaaagacttacatttaagacttcaaactatgaaactactgaaagaaaacattggggaaattctctaggacattggactgggcaacgatttcttgagtaagaccccacaagcacaggcaaccaaagcaaaaatgggcagacgggatcacatcaagttaaaaagcttctgtacagcaaaggaaactatcaacaaagtgaagagacaacccacagaatgggagaaaatatttgtaaattacccatctgacaagggattaataaccagaacatatacagagctcaaacaactctaggaaaaatagaataatccgattaaatgtgggcaaaagatctgaacagacacttctcaaaagaagacaaatagcaaacaggcacatgaaaaggtgctcaacatcactgatcatcagagaaatgcaaataaaacatacaatttttctcattccagttaaaatggcttttatccaaaaaatcagtccataacaaatgctggtgaagatgtgaagaaaagggaacccctgtacaatgtcggtgggaatgtaaattagtacaaccactatggagaacagtttggaggttcctcaaaaaactaaaaatagagccactgtatgatccagcaatccctctcctgggtatatgctcaaaagaaaggaaatcagtatatcaaagagttgcctgcactcacgtattcactgcagcactattcacaatagccaagatttggaaacaatctaaatgtctatcatcacatgaatgaataaagaaatgtggtacatacacacaatgaagtgtatgaatgagatcctggcatttgcaacaacatagacggcactggggggtcattatgttaagtgaaataagccagacacagaaagacaaacttcacatgttctcgcttatttgtgggagctaaacattcaaacaattgacctcatggagatagagaataaaaggatggttaccagaggctgggaagagtagtgggtggtgggagggaagtagggaaggttaatgggtttaaaaaaaaaaatatatatatatatatatctatatctatctagatctatctatctatctatatctatatatagatatatatctagatatatatagttacaaagaatgaataagacctagaatttgctggcacaacagggtgactatagtcaaaattagtttaactctacacttaaaaataactaaaagaatatagttgtattgtttgtaacacaaaggataaatgcttgaggtgaagtgacggataccccatttaccctgatgtgattatcatgcactgcatgcctatatgcaaatatctcacataatccataaatatacgtacttactatgtacccacaataatttaaaaaaattttaaatctaaaaaagcatgtccataaaaggaaaatagataaattgaatttcatcaaaaattacaactttgtttgttttgttttgttttgagacggagtttcactctgtctcccaggctggagtgcagtggcacaatctcggctcactgcaagctctgcctcccgggttcatgccattctcctgcctcagcctcctgagtagctgggactacaggcgcccaccaccatgcctggctaattttttgtatttttagtagagatggggtgtcactgtgtcagccaggatggtctcaactgcctgacctcatgatccacccaccttggcctcccaaagtgctgggattacaggcgtgagccaccatgcctggcccaaaaattacaacttctactctttgaaagacattgttaaaagaatgaaaagacaagccactgactcagaaaacatatttacaaagtctgacaaaggacttgtgtctggaatatataaacaactcttaaaattcaacaataagaatgcaaacaattcaacacaaaaatgggcaaaggatgtgaacagacactttaccaaagaagatacacggatggcaaatacatctacgaaaagatgtttcacattattacccatttgagaaatgcaaactaaaatcaccacgagataccactacatacctactagattagctaaaattaaaaaaaaaaaaagatcatatcaagagttggcaaggacatggaagaactgaattctcatacatggcttgagaatgtaaaatggtgcaaccaatttggaaagcactttggcagtttctttaaaagtgaaacacatccctaccatatgaaccagcccttccacttctaagtattttcccaagagaaaaggctggacatatattcactgtcatgcacacacaaaggcttgtacatatgttcactgtcatgcacaaaggcttgtacatatgttcactgtcatgcacacacaaaggcttgtacatatgttcactgtcatgcacacacaaaggcttgtacatatgttcactgtcatgcacaaaggcttgtacacaaatgtgcaaggaactggaacaactcaaatgtccatctacagctaagtgggtaaacaaattgtacatccacaccacagaacacagctgacccctgaacaatgtgggggttaggggtgctgaccccctgcacagttgaaaatccatgtataagttttaactccccgaaaatttaaccactaatgccttcctgttgatgggaagccttaccgataacatcaacggtcggttaacacatattttgtatgttatatgtactatatgctgtatttttacaataaagtaagctagaggaaagaaaagcttattaagaaaatcataaggaagagaaaatacatttatggtactgtactgtatttattgataccctaagttcacgtagtctgtttacaagaatcatctgtctgaaatgaccacagctgcagccctcagtctacagtacatagcaaggaattcagctttttcttgtaatgtcatgacttttctctgctttttgggagcacctccagcattaccagtggcactgtgtatgggtcctagggtgtcactcaaggtttataggatcgccttaaacatgattaaaactgtgtgaaaactgtgagaggtcactggttttttttgttgttgttttttgttttgttttgtttttttgagatggagtctcgctctgtcgcccaggctagagtgcagtggcgcgatctcagctcactgcaacctctgccacctgggttcaagcgattctcctgcctcagcctcccatgtagctgggattacaggcacctgtcactgtgcctggctaatttttgtatttttagtagggacggggtttcaccatcttggccaggctggtctcgaactcctgacctcatgatccacctgccttggcctccgaaagcgctgggattacaggcatgagccactgcgcctggccgagagatcacttttttactgtgatttgtgatttactggagggaggagctgtgcttgcggagatgatcagcctcacccagcgttttaagcactcacagcacctgagctcgcggctgtgccggcaggaggggtttgtaaaacatcagtcgtgcagcacgcactgcagtgagttttgtgcagttgtgattcatttctgcatccctacatttgtttaatttctctaaactgtgaaagaccccatatgtggtctataagtgtttgtatgcatgttaagttttgataaattttaactttttataatagatttgtgtataatttttggtattacatgatttaaaaacactagcatcactatatattttatgtactcatgacacatctttttgttagtgttttcagtattcctaggccatgctgtttgtctgaaagcttttccaaattgttacacatctccaaaaacctctccaatacacttgctgagaaaaacccaagtgtacgtaggctgtgcagttccaacacactgttcgagggtcaccactgctgtgagcgagccacgcatctggacccacagtaattatgctgagtgaaggtggccagaccagtgaagcacacagcacatgactgcatttacctgagcctccagcaaatgtaaaactgctgtgcaggcagaaagtgggtcatggttgcatggtgtggggagggctccgggatggacaggaggaaacttggggtgttggatatatgtgttcactgtgttgactgtggtgggtcactggggtacagacacatgtcaaaaccgatcaaactgtacatttgaaataggggccatttgctgtatgtcagttatacatcaacaaagctatacatcaacaaaggtatacatcaacaagacaaatggacaaatcactgtaaatcccataaagcctctagctctaagtactactttgcaggaactccagggacagaggaatctgttaaatgagaccagggagatgcaatcagcagaagtcggactactgaaagcaccgatggcaaatcattcaacatcgtccacaacatagtcaaggaaaaggaagacggaggaatctggatatttaaagggatttatcaacaactgcaatgtatgcaccttctttagatctcaattcaaaccagaaactgtgaagaaaaaaggaagaagatgagaaagtggacaaggaggagaaaaacagaactttatgaaacagaaagtcccaggaaggaacacttcggcatccttcaagtcaacacagggtgtaggactccatttacgtaaaattccagcaaacgtaaaccagtctatggtcacagaaagcagaggggcgggcggggtgggggacgggagcccctctaggtgctgggtgtgtgacctgcacacagagacatctgagaggaacaagtggtgggtttgcagtaacatcgttttttctctgtaattttttatattgcttgactttatgaaacagtgaagcataacttttgacaaatgcaataaagtttttctttttctttttttgagacagggtctgttgcccaggctggagggcagtggtacaatcatggctcatggtggccttgacctcctgggctcaggtgatcctcccacctcagcctcccgagaaactgggactaaaggtgtgaaccaccacacccagataatgtttcgtagagacagggtctcactatattgcgcagactggtcttaaatccccaggctcaagtgatcctcctgcttcagcctctcaaagtgctgggattataggcgtgagccactgcgccttttttttttttttaaatttcccacactatactggcatgaaggtctattttaaaattgttttaagtgaatacagtatgtaactgataaaagaacattgattcattttaattaaaaaacatgaaaataaaaaactcttctatgggcatcaaagctaacactcaggagaaagcctgcccccacggggcagctcagccatggcctccggggaacccgctctcggtgacagcgctctgaccgcggtctggagctgggctgaaactcaacatgtgtccagactgctgcagttcagaaccagcttggcaacgccgaaccgcattccggtttgcacgaggtgcacgttacttagaaaagtagccacagtctgcctgagttcccgttttaagtattttcacaacttcactgaaaagcacagcaactcactcacagtgtgcagcctagtcaccaggacacgcgccctcggccgctagctcgtacagggaagggctgtcatgacatgaccacaagatggtctctgcctcccccaggggcagccaagggccccacagaggatggcagggacaagccacccatgtggcaacggccacgtcccctccctcagacggcagccagtcatacccgaggcggcaccgcgggcggccccgtgtccagtctcacagaagcacagtccactgccgaggacaccctgttgtccacatcgcatgcagcagcctggctcttggaacgtgctgggggcacacgggacacggagacgctgaaacactagctgtgggattcctgagcccgccctcccactctctgcagtccgcgtgtgggattcctgagcccgccctccgcgtgtgggattcctgagcccgccctcccgccctccgcgtgtgggattcctgagcccgccctcccactctccgcagtccgcgtgtgggattcctgagcccgccctcccgccctccgcgtgtgggattcctgagcccgccctcccgccctccgcgtgtgggattcctgagcccgccctcccactctccgcagtccgcgtgtgggattcctgagcccgccctcccgccctccgcgtgtgggattcctgagctcgccctcccactctctgcagtccgcgtgtgggattcctgagcccgccctccgcgtgtgggattcctgagcccgccctcccactctctgcagtccgcgtgtgggattcctgagcccgccctcccgccctccgcgtgtgggattcctgagcccgccctcccgccctccgcagtccgcgtgtgggattcctgagcccgccctcccgccctccgcgtgtgggattcctgagctcgccctcccactctctgcagtccgcgtgtgggattcctgagcccgccctcccactctccgcagtccgcgtgtgggattcctgagcccgccctcccgccctccgcgtgtgggattcctgagctcgccctcccactctctgcagtccgcgtgtgggattcctgagcccgccctcccactctctgcagtccgcgtgtgggattcctgagcccgccctcccactctctgcagtccgcgtgtgggattcctgagcccaccctcccactctctgcagtccgcgtgtgggattcctgagctcgccctcccactctctgcagtccgcgtgtgggattcctgagcccgccctcccgccctccgcatgtgggattcctgagcccgccctcccgccctccgcgtgtgggattcctgagcccgccctcccactctctgcagtccgcgtgtgggattcctgagcccaccctcccactctctgcagtccgcgtgtgggattcctgagctcgccctcccactctctgcagtccgcgtgtgggattcctgagctcgccctcccgccctccgcgtgtgggattcctgagctcgccctcccactctccgcagtccgcgtgtgggattcctgagcccgccctcccgccctccgcatgtgggattcctgagcccgccctcccgccctccgcgtgtgggattcctgagcccgccctcccactctctgcagtccgcgtgtgggattcctgagcccgccctcccgccctccgcgtgtgggattcctgagctcgccctcccactctccgcagtccgcgtgtgggattcctgagcccgccctcccgccctccgcgtgtgggattcctgagcccgccctcccactctccgcagtccgcgtgtgggattcctgagcccgccctcccgccctccgcgtgtgggattcctgagcccgccctcccactctctgcagtccgcgtgtgggattcctgagctcgccctcccgccctccgcgtgtgggattcctgagctcgccctcccactctctgcagtccgcgtgtgggattcctgagcccgccctcccgccctccgcgtgtgggattcctgagctcgccctcccactctctgcagtccgcgtgtgggattcctgagctcgccctcccgccctccgcgtgtgggattcctgagctcgccctcccactctctgcagtccgcgtgtgggattcctgagctcgccctcccactctctgcagtccgcatgtgggattcctgagctcgccctcccaccctccgcactccgcgtgtgggattcctgagctcgccctcccaccctccgcagtccgcgtgtgggattcctgagcccgccctcccactctctgcagtccgcgtgtgggattcctgagcccgccctcccaccctccgcagtccgcgtgtgggattcctgagctcgccttcctgccctctgcggtctgcgtgtgggattactgagctcaccctcccgccctccgcgtgtaagtggacctgtgcggtcgggtttcccagctcagaacttgaaccagcctgaactgccggcctgagaccagcctagcacatgtgtccgctggggccactctcatcttccactctgtgcgattgatggcatgtgagtgaaggcgaggacagaaggaccacggcccacgacgacgcagacacaagaggccacagcataatgcatgagatggcgcccagaggcgacctgtgcacctgccccagacaaggcgccaggcgaggtacctgggttaggagctgctccggcgtcagctggttgatccaacgtgtgtatcgttcggtggagttagggggatctctcctcactctgcaaccaatgatctgtgaaaaacaacggcagacagagctcaaaacaaagtcaggtacgcaggtgcatgtgcacacctgtgtgtattcatctcacatgttttaggcagagatgtccagacaggaaactgaaatgctgcaaatctgggtcaggcaaacaccgggagtcgagggcgaggaggaggagggatgcctgcttttgcttggggacagcatagcaacgatgggcacgacagaagacggccctggacgcgcatctcggcggtgaaccacagagctgccctgggctggattgagaatatgtcacagatgacatttccccttaatgaactcaaatcaaatggcccatatgcaaggtgagttatttctaagaactcacttcttgaatcacatgcaaagtggatgtgaggaaaccgctgcctgtccgcaggccgcccgtctgaacctgctccattcagctcaggaaagcagcgtccctaagtggagaagagccttgctaccagctggcttcctccagggccgacaaccctctccccgggcatccaggccagcacccctgcctcaggtgacatcctgtcagtagccttgaccccctcccgggccctgcagagcctcagagcatcacctgcctcagcctttctcaacccttcccccgccctccgccctgcccggccccctccagcctgacctctgccccggagtgggctcccagcactcagccctggctctgttctgctcctgagatccagaggtaggagggcaggtccttcagggctcacactcaccttgcagtgggaggagctggctggagagagggcacctgggcgcgtccgtaggaaacagcacccaccccaagtgagggcccagggccagcagagcctcccgagtagacgttctcacagcacaggccccaggtcacaagtcccagcggacgcagctgattccgtctcacccaagaccaacaaggagacaatagtgaaaatgtaactgtggtccaaagagtggtatcagtgagccagtctcctaactctgaagcgatgaagtcacaccgaggcatctgaggcccctggatctgtctccaacttgtgtagcgtttacgcgtagtgagtgattcttttctaccaatgcagttaatgacgtgcttgggggaggcttctgtttgcatttgttgttgttgttgttttttaattaaacttactttgagaaaattgtgaattcacattgcagctgtaagaaacaactgtagagagaccctctgtgcccttcaccacttcctctggtggtaacatcacgaggacccaaggtcaacgccgcaccaggagagggacatgatggagtccagatccagatgtcccagggcacgagcacccgaggcgccccttacagccactggcagcccctcaacggcagccgctgtgctatcccgacgccgtggctgtgctatcccgacgccgtggctgtgctctccagagcatgatccgggaacgtgcaggaggcggccttctgtgcccggctttcgcactgctcctcggctcccaggacaggcttccagtcactgcatgtaacagtagtcaggtcctgtgctggcgatcccgaacattcaagttcaggtttgtctgtgaacagcgtcttcaatccactgggataaatgcccaggagagcaactgccgggtcacagaacagttacatgtttagtttttacaggaacttccaaacagtctccagagtggttgcgccgtctctcaccctcagtgatgcatgaggatccagcttctctgcctctcgccagcactgggtgtctcggttttcattccgttctgatggcaccgtgctttaacacaggctccctgaaggctggcgaggagcatcttttcgcctggttctttgccgtctgtacaccctccttagtgaaatgtcttttcatgtattttgctcattttctaattggaacaaacgtgctcggccatggctgtgtaattcttttcatatgctgctgaattctatctgtgaacctttcatgtctctctcctaaagcacatgctaaaaatagttgtgaattaggacagctctggagccgccgccctgcccagcgagttttccccacacccaatctgaccgagatgcatttctaaactgtttggtgtgtctgtttctgtgcatcctgcatagcatctacctacgtacaattgcatctgtttcctggtcttgtctatactgtctcacgtttgactgctgaacagaaaagattttgagggaagctgatcaaaagctggaggtagaagtcctttgttccaaaacgtgaagacagagaggctcagcatctacacacaaacaccgagaccctgaggccagcactgccgggtcctgggaggcagctgtgggcgacaggtgagtacacgccagcccactcctgagagcctggatcccgctggggcatgagaggcgcctctcggacgggggctgattgacgcctgcttccactgcgcatgcccgacccctccccatgactcccccagcttcatgcttccctggaaaggtaaagccacaccgggtctctcaccaagagtgaggacggggtgggggaatcctgtgaaactagaggcccgaggctggcaattcctgtggctttaattaaccacgagccacgagcattggtctataaacggaggaggtgagaggatcttttttggcctcaacattttttaaccttggaagaaggcagcaagctctctcccgtgcaactgcatctaaacagcagtaggaaggcgtggattccagacagaccaacagcgcccagccgcgatgctgccggcaccttcctctgcaggagacctcgcgctctcaagaggaggcgcagggaagaggcacgctctcaagaggaggaggaggcgcagggaagaggtgcgctatgcgcttaatcctgcaccgagacgtcagattctcagggcaggagcttttgtgggcaccgcacctagcacagggcctggacccagtgagcagatgtgaatgagaggcctgtgcgctggcctgagaggctggctaactttctccaggttcctagaagaagccactttcaaggctttcgagaagtgttgtgagctaattcatttgaaagcctctgtgccaacaggcggagcagaaagcgcaggccgctggagttgatcccaacaagcaatcttggaactctttctgaatttatacggggaccaccaggatctggcaattccaccgaaaaaaagagtcagaacgttgaaaggaataggatactgacagaagggaggtgtgaggggacacggggggctgtgctccctaagttgcctgccacagtccctccctgcctgccctcctcacatggccatcgaccctcaagcactgagaggtgaggtctgcgctccctcccctcaaatctggggtcagcatgacaccacgtgacacggtgctctggggctacattgtcaaaggcaacgcagcttctggcaggctctcctggacacttgttcttgcagccaccatgctgcgaggaagcctgagcagcttcgtggagagaaagcgcccagcccggatccctgccattgagcgagtgcgcgggctccagatgatcccagccaggatccctgccgccgagcgagtgcgcaggctccagatgatcccagcccggatccctgccgccgaacgagtgtgcgggctcgagatgatcccagcccggcagtccagaggtgaggatgcctgcgaatggagacaagcggcccttcctgacccacaaagacggaaactcagacttgcaaggtgaacccatcacacagaaggaaactcacacccccaggtgaacccatcacacagaaggaaactcacactcccaagtgaacccatcacacagaaggaaactcacaccctcgaggtgagtcccccatcataaaacgtaactcagggctggaacgtaactcagggctgggcgcagtggctcacacctgtaatcccagcactttggaaggcagaggcgggtggatcacgaggtcaggagttcgagaccagcctgaccaacatggtgaaaccctatctctactaaaaatacaaaaaaattagccgggcgtggtggcgcacacctgtaatcccagctactcaggaggctgaggcaggagaatcacttgaacctgggaggcggaggttgcagtgagccgagaccgtacccctgcactccagcctgggcaacggagcaagactccatctcaaaaaaaaaaagtaactcagattcatgaggtaagccccccacacagaaaggaactgagacccacgaggtgagtccccccactgcacggcctggcacagtttgcagggcccttggctctaaagacggtggcaagaaggtcagggctgctggggctgcagctcagactccccgtggattcgccacagaggccgagtcctgaagacggcaaaggggcgagaccttcgatgggcagcgcaggagggtcaagcgtgtctgggtgaacccaggtgaggtgccctcggtgcatggtgctgggtgcgagggaggaaggaggggccgggctgaggcgggaggcaaatgaacgcagagagctcagaagggccccttcccagaaagacacgtttctggcacagactcaagaagtcagcttctgaattacactgaaggaaagaaaagaaaccagttgcatttttgacactaacatcagctccctggggccactgccttggagtgaacgacttgccgtccactgctgtgggggaggggggctgtgggggaggggagctgtgggggaagggagctgtggaggcccctggtgttggggggctgtgggggcccctggtgtgggggggctgcccggcggggggctgggggggctgtgggggcccctggtgtgtggagctgcaggggaccctggtgtggggggggctgcgggggcccctggtgtggggtgctgtgggcagccaggggtgcctggggagctcgttcaaccaccaggcaggcggctcttctccagcactgctgctgctgagccacgccccagggtccagagtcaccagcaccgggggcttcggccgccactcctgagcagcgatgttgaaggcgaaggtgaaggaggagcacccaggcctgacagcccgaactacagcccagcagagcccggaggcagccgtccagtgtgaccctgtcactccctgcccccggagcgaagagcacggtcagaggagagcccacaagcactccaacttcaagagctgagtcagtcactgcaacagcttctgcctctccaaggcccagtctggcatgttctgccccttccagcttgggaagtcacacaccggtctgggcatgggctcacagggctgggggccgtggccctcccaggctgcatgtgcagaggggctgacgccccagccctgtgctctgggacttcctcagacaaaggctgcagagtgcaccgcggacttcatttaaacagaacacctggaagtcctgtttatttaagttaacacgcagcttcttgtgggggcagaagtggaagcagggagagtcggctgccgtgccgtctggatgattatggcttggcacaggcaaggagcggggaacggcgcccaggatgcagggcacggcggctccacccattcccccgacaggcaagctgtggcccaggctgcttcacaggaaccctcccgtctttgttcctccgcgtcgcttccctacacctccctgcatgctccatcccagtgcacgagggtgggtgaggctgtaccctaaggtggagcacctgccctcacggggctgtaccccgaggactggtcttgaacgttgggaacagagatcagctctggaaaggagctgggtggagccagggcagccttcgtgtttggtctggggtggtctagaggtgaccaagaatgcaggctttcctctccgatgtctcctgagcccaggcacagaggtgggaaaccacagggtgcacagtgtcaggaatccaagggtcagccggggcgagaggaggaggaaggacgggggttggctggccctcaggaacgggggcaagttacagggcgcaatgcgggttccctgttcttgctaaccttggataacgatgctctacatgcaggattcctaaagttctgcagtgatttatctacatgcaaatgcacgatttatgaaagccgccatcaaaggtccttcctaattagctggtttcttgtaaaagatcttaagaaaacaacgaccaagtacaagtatctcagcgtttatttcattctctcaggacaaactacacaatgtaattcacgtaaccacgaaccagcaactgcaaattaagatttttgtaggtcatgatttctaaaaaatccagccacgcaataacagcctttctaaagctgactttgttttagtgaaacaaaactgtgatgacatccctaagcttcctccagaagagcttcgacgtggagaaacggggtggacgctccacctaaccgcgccattgggaaaagaggaggcacctggagcagaagcttctctcccaagtgcacaacagagcatcagcgaaggcagtgagaagagtagcaagaaaaaggtttaaaatcatcgatgaaaatggaaattaagcttgtcttattacaattaagacaaactgaccatgtgcattttccccacattcctgtggggaatcccagctcgtttgaacacacgccacgaactcctggtatccgtaagtatcccagctcgtttgaacacacgccacgaactcctcgtatccataagtatcccagctcgtttgaacacacgccacgaactcctcgtatccataagtctcccagctcgtttgaacacacgccacgaactcctcgtatccataagtctcccagctcgtttgaacacacgccacgaactcctcgtatccataagtctcccagctcgtttgaacacacgccacgaactcctcgtatccataagtctcccagctcgtttgaacacacgccacgaactcctcgtatccataagtctcccagctcgtttgaacacacgccacgaactcctcgtatccataagtctcccagctcgtttgaacacacgccacgaactcctcgtatccataagtctcccagctcgtttgaacacatgccacgaagaactgccaaaggcaactccattaatgaagccaatctgggcttgtttttcagtatggaaatgaaaacatctgaaagtatctcctccactaaaatgtcaacactcctaacaaaattccttagacgtctgtatgattgattctaaatagctggcaactgtcatttctagctgtgtaaaaatcgctgtggcacctcacatacggacggctcagtccagccacggtttccagctcacgggccggcacagggtctgctccaccttccagtccacaggaccacacagctgcagggacgcaaagggagccgttgggcagctaacgtggcagggacgcccctttcctctccagcctccatgtgcgatatctcacacctctgcaaaaggccctcctggaaaccccagactctgcactttcctcacataaactgtccacagaagtccatcccgaaggacattttcccccattttccccctattccccacaaaggaactggactggaaaaaccgtctgtgatcactctctgtttccacatgactgaaaccccacagcacctgtggctggggtagaaatcacccctaatccctagatccccgggccccccgtcccacccgacaagcagacactctcggacgtctctcccaggcagtccatgcctgtaaacttccagaaactgacttccggagcctgtggccccgattgccatggatatgctgtcacactctcacacgtatttgtggttgctacggagaaacattcagacatatttgcggttcctaaactttgcaaacacgtgacccttttaagaatctgctacaagccacagagctctctcctgccctcacagaaaatgtgcccccacagaaggccctgcagccacgctggggccactgagccccaggacctgacacacccccaaaggaggcaaccgtgtggggccctctgcacccgagaaggtggcctgtgtctcagtctgtctcctgcctcacgtgagacgcaaacctccgtgcagccggctgcacccccagcaccgcccacccccagcgcaccagccctgcccccatcccaacccccctccccctcaatgctgcccccccaaacccccacaccctttcccccctcccaaccccctctggttccaacacccaggccctccccttcagacgcccccagcacacccgtcctgcccttgcccccctgcccgaccccccacagggtgaactgtcacgagcacccactctgtggggagctgggctcccagcgccgtgtgggccagaccctgccgtgaccaggcccgtctgtgacctgaccaggatgtgaccagagccggccgtgactgaaccgtgtggtgacccaaccgcacacgtgcccacgacgcacagccccgcggggggagggcagaggggcctgtccagggtgagcgccaaactgcccgggggacggacactgtgggcgctggacagttatggatccctcagtgttaaaacccaagtgatcaccgctgtgattcaaagtcttctaaaacttgagcgagatctctgaggacacagtcaccttccctgaagccagcaggagcctcgcggtggctgagacaccagctccagggatccctgggccatgtgtccccaccatctgcggtgggggatggaggagcccacggggcactgctgtgcttcctccccactgggcggaggagcccacggggcactgctgggctgaggaggggccccaggaagcctggctttggaggggcaactgagaagccgttctaaagataaaaaccgtaatttaagatcgtctaaataagaaaaacgtttaactgtgaacacggtatagctctcagcctgtgttttcatgtctaaggcgctcagcttctaaaacgctgattaaaaacaaacaacacaaccacctttgcaccctacgaaaataacaggagaaaaatcaggggcatgtttttctccaaaggaaaacaccctccagggctcagagacatgccagccacagatccctctccgtgacttgacagtctcaccatagcctgattctttccacccctaggaaaactctttatttaaaaaaccacagtggtaatttcactaaaggtagtaacgacactaaggaggccagtacttacgctcgacgggtgctgaacggcagcctcgtgttgcagcctcacccgctggggcatcatgacgtcatcctgcagtaaagaacacactttccgtttgtttgtttgcattgattgatgcatagactaatacagtcccgctttattgcccaggctggagtgcaacggcacaatcatagctcactgcagcctcaaactcccggcttcaactgatcctctcgcctcagcctcccaaagagttgggattacaggcttgagccaccatgctcagccccaagaacatattttaaactcacataaagcaattcctacaaataagtaagaaaacgatagacaatccaacagcaaaacaggcaagggccttgaacaggccattcagacaagaggatttccagtggaccaacaacctcgtcagccatcagagaaatgcaattagttatgcagcggagaaggaaaaataaaaaatgctgacaattccaagtgtacttaattaggcagaacaagagctcccatgcactgctggctgcgatgaggacctgttaccactgtggagggggaccgtctgcagtgaagacctgccaccactgttgaggggaccgtctgcggtgaggacctgccaccactgtggaggggaccgtctgcggtgaggacctgccaccactgtggagggggaccgtctgcggtgaggacctgccaccactgtggaggggaccgtctgcggtgaggacctgccaccactgtggagggggaccatctgcggtgaggacctgccaccactgtggaggggaccgtctgcggtgaggacctgccaccactgtggaggggaccgtctggcatcttccagcaaagctgaagatgcacttccctaagaccctgacgtctgactacttgggtaggaaaagccctactcacacacacagacatgctcacggcagctcattcaaatgtggaaagaacccagtgagtgagaatagcagatacatgaattgtgcatgttattttcaaatgccattcagcagctgaacacaacagaaatttcacaagcctaatgttcagtgaaagaagcaagacacaagaatatacatggtattttccccttatttaaattcaaaaccaagccaaataaaccatattatttaagaaatgcacacacagtgtgtaccagggtcccaattcccggggaagcgggctggtgccgcgccatggaccaggccacacagcaggagtgagcggcggccgggcgagcgtcacggcctgagctgcccctcctgtcagagcagcggctgcattagaccctcacaggagcgcaaaccctactgtgaactgcacacgcgaggaatccaggtcacagactccttatgagcatctaactaatgctgacggcctgaggtggaactgtttcatcccaaaaccacgcccccccaccatcggtctgtgaaaacattgtcttccacaaaacctgtccctggtgccaaaaaggctggggaccacggatataaaccataaagaaaagcaacaacattataaccttgaagatcagaagagtggtcactttttggggggaagtcgaggtgggggcatgggtgggacagtccctttaaggtgccggccataagcatttattgatcgagtggtagctacacaaatatttgcttcataattaacttgtaaattaatggatatttatgttttgtgcatttttctgtgggtgtattctatctcatgataaaaaaattaagtggaagaacagcaaaggtttaagtacatgagtaaaaggtacaaatgtactcaatagcagaaataagaataatgtcattggaaggatatctgtttttaagttgaacgctaagatgaactaaaatacccatatttatgtctcttattcccgcaaaacggccttaggacattcagatcatccaacgaaccatgctgagggaagccgagaggaacctagtggggctgaagagaggaggctggggacagaggggaagtgggaggagggcagagagaagagaataaaggagggtggagaatggaggagtgagaagggatggagggaggagggaagagggcagaagaggagggtggagaagggaggagggagtagggaagagaacaggaggttggagagtggaggagggagaaggggagaggactgaagaggaggggggaggagggaggagggacagaagaaggagggaggaggcaggtggagggtggagggaagtgggggttggggagagagaatagaggagggagggtggaggagagaggagaagggaggagggaagaaggaggatgaaggtggagaagggagatggaaggagggaggagggaggaaggaggaggaggagggctaaaaacctgcatatgaccctgacaggtatttcaaaaagaagagctgaggaggctcaaaggaaccacaggcaccacctaaggggcacgtcactaaccttcaaacacgggaccctcaaaccttccgacccctggtctagacacctaatccccgatgccccaagcccaggctaaatgtcctgtgggaaagtctcttgcaccttctagaaccagggccaggccagttcttctatggagttggccctcaaaaatatttgtaagacatggaggtcattaagtgaaatatccagacacagaaagacaaacgctggtgttgccacccatgtgtgggagctgaggagatgatctcgtggaggtagaaggatggcgctcagcagaggccaggaagggcagtggcgggaggaggaaggggggttggttaaagggcacaaaactacagtcaggtaaaaggagtagttctagtgttcgatagcacaatagggtgactatagttaacaataagttattgtatatttcaaaatagctagaagacttttatggccaggcgcagtagctcatgcctgtaatcccagcactttgggaggccaaggcaggcggataacttgaggtcaggagttcgaaactagactggccaagatggtgaaactctggctctactaaaaaaaaaaaaattcaccgagtatggtgctgcacgcctgtagtcccagctactcaggaagccgaggtacgagaatcacttgaacctggaggtggaggctgcagtgagctgagatcacgccactgcactccagcctgggcgacagagagagactccatctcaaaaaacaaaatgaaatagctagaagatctggaatgttcccaacacaaatgataaatgtttgatgtgatggatggtccagttaccctggcttgatcatgacacacggtgtgcctgcatcgagtaccacatgtgctccgtgaacatggtgcgcctgtatcaggtaccgcacgtgctccatgaacaccgtgcgcctgtatcaggtaccacatgtgctccacaaacacggtgtgcctgtatcgggtaccacacgtgctccacaaacacgacgtgcctgcatcaggtaccacacgtgctccacaaacacggtgcgcctgtatcaggtaccacacgtgctccgtgaacaccgtgcgcctgtatcaggtaccacacgtgctccgtgaacaccgtgcgcctgtatcaggtaccacacgtgctccgtgaacaccgtgcgcctgtatcaggtaccacacgtgctccgtgaacaccgtgcgcctgtatcaggtaccacacgtgctccacaaacacggtgcacctgcatcaggtaccacacatgctccgcgaacatggtgtggctgtatcaggtaccacacatgctccacaaacacggcgtgcctgtatcaggtaccacacgtgctccacaaacacggtgtgcctgtatcagataccacacgtgctccacaaacacggtgcgcctgcatcaggtaccacacatgctccgcgaacatggtgtggctgtatcatgtaccacacgtgctccgtgaacatgtacaacgatccctaaaaacttcaaaaatatatttgtaaaacaaatgaatagatctttaattcacttcaccatttataaaacacacacatacactttttttttatatttatcacactcttctatggctggagagagaatagctaatattatctctattttgtagccaagaaaacggaggtttggaaagggtatgtaattcttaatacccaaagtctcgtagcaattacatgtcagggttaaaattggatagaacgcctcatccaacaccatggttttccacaggacattgcttctgaccaaggaactcacttaacagccaaagaaaggtcgcaatgggccgggctcctggaattaacttccctctcatgtccctaccatctcgaagccatgggtcggacagaggtgggatggcctttggaggtccagttacggcacccattcagcggcgacgctggcagggctggggcgaggctctccagaggccgcactgactccaaatgagcctctgggacatggagctgtttctccccagccagggctcacggggccaggaatcgaggggcggacatgggagtggcactcactgtcactcctggtgatgtactaggggagctcctgcttcctgccccctgacgttgtggtctacaggccgagaggtctgggtcccaggggaggaacactgccaccaggagacgcacgatgacgccgccggaatggaagttaagaccccacccggccccttgggctcctcatgcctctgagtccacgtccagaaagggattgtctgtgctggcccggggattgatcctgaccacccagggggaattggcctatgtggccacaatggaggcaggacagagtctatgatgcaggagaaccctggggcgtcaaattactccacagagaacggttcaaataaaatggccagtgcgcaaagacagccaggcttataagtaaaaacagacaaaatatcagaaaacaaaagacttgatatattcaaattatcacgcacaaaatatttttaaaatctatgcaagttgtatttaaaaaactaaaagatataagacatgagcaagtcatgaaaggacaaatattgtcacaggaggtcccttagcagagccaaagtcatggggactggacggagacgggtggcagccagaggctggggcgggcaatgggctgtttcacggggacagagcttcagttcgggaagacgggaaagatctggaggcggaggcggcgggggctgcacagcaatgtgactgtacttcacgccactgaattaaaaatggctaaaatggtaaattttatgttatatacattttaccacacacaaaaactaaaagacaaacttgaacaatagaactttctctctttttttttgagttggagttttgctcttcttgcccaggctggagtgcagtggcgcaatcttggctcactgcaacctccttctcccaggttcaagcgattctcctgcctcaacctcccgagtagctggaattacaggcgcccaccaccacacctggctaattttcacatttttagtagagacagcgtttcaccacgttggccaggctggtctcaaactcctgaccttaggtgatccacccgccttggcctcccaaagtgctgggattataggtgtgagccactgcacccggccaagaatagaactattagaactaaaagacaaatcccaattaagcataacacagacaaatttaatagcaaaacagattttctaaagagatagtgaatttgaacatatatcaaaataaattattcagaattcagcatgaaaagaccagaagatggaaaacagagagaaaaaaagaagaaaaaccaaagcgatataaagtgtaagagggtcccagaaagagagagagaaaagcttactggaaacaagcaagctttgaagaaatgacggctaagaaatttctgagaccgataaggatgcctgcacacacaattacaaagcccaggccaggcaagtcccagaaaacccaggagccgagtccacttccaggaacggacgaataagttgcttcagaacaatattttccatagaatagctggaaaagctagaaaaatactaaaacaaaacaaaatgcctgttgaaagccactggagacccacaaaggccacaaggaccaaagaccgaggtctggagcggagaagcccagagaggtgagcaggacgcccctggggacacgatggggccttggggcccagctcaccaggccaccagcccacctgcccatcgggagacaaagtcagccccaggggaggtgatggccatcccgaccatccggtcatttctaaaaccagcgtctcaaagagttactgattctgagcgcagttggggagaggccacggccgcatggcactcctgccactcccagggctggaaggaaacacggggttcagggatctgtgaggacggggactggagaacaccccgagttttctgctgggacccacgagaaccaactgcatttaatttggggaagacagagagagagatcattgcgaaggggcatgaaaggggcttccgaggtggttacattttctatggtggccacaggaatatttgctttatgatactttatagagtcatacattgtgttccacacgagtatttgccttatgaagctgtacgtacatttgtgccctacatgaatatttgctttatgatactttaatgatactttatggacatctgtgttttgtgctcttctctgtatgtgtttttcttcataatgaaaatgatgaaacaaacaagaattttgaacacgaggttgttgctagaagcacttctgttcaacactgtactggaggtcctagtcagtataatgaactgaaccaagaacgcggaataagtaagattggaatagacattggagaggggtaaaaggctccttattcacaggtgacataatcatttcatagtaaattgtaaagaatatgcaaaaaaaaaactctactagaataagctaatgtagcatatttgcagcaataaaacttggaaatgaattgttaataccacttttcaatagcactgaaacccaaaaatacttaagagatatattttattaaatgttgaagacccataccctaaaaactacaaaatattccagagagaaatttaagaaggcataaacacatggagagatatactatgtttacggattagaagactcaatactaagatcctcaagtggatttatagattcaatgtaatcccaataaaaatcagcaggcttgaccagttcattctaaaattttgcagaattcaaaggacctaaaagaaaaaacgaaaaaaaccaacacaaccattttgagagcggtaagaacaaagctggaagacttacaatcccagattttgagacttactataaagctacactgtagctttattactgcagctgctagaataatcatgtaatagtaatcaagacagagtggaactggtataaagagaaatataaagatcagtggaacagaacagagcacagaaatagatcaaatagatccacgcttttttggatccactgattttcaacaaaggtgccaagataattccacagagaaagaacaggaatgctggaaaaaccggacatcatccaggaaaaagaatcctcagcccccatatacaccatcttcaaaaatgaacctgaaatgaaccagaggtctcaatgtaaaagataaaaatagaagacatccaaaagaaaatgaagaaaactttggggcagacaaaggtttcttaggttcttagacgggacacaaaaagcacaaatcttatttttctttaagtgataaaatggtcattatcaaaatttaaaacttctgttcatcaaaagacatggccccacgtacaccagtgtgaactcacatgagcttagcactgtccccgccccacctgcaccagcgtgaactcacatgagcttagcactgtccccggcccacctgcaccagcgtgaactcacgttagcttagcactgtccccggcccacctgcaccagcgtgaactcacatgagcttagcactgtccccgccccacctgcaccagcgtgaactcacattagcttagcactgtccccggcccacctgcaccagcgtgaactcacatgagcttagcactgtccccggcccacctgcaccagcgtgaactcacatgagcttagcactgtccccggcccacctgcaccagcgtgaactcacatgagcttagcactgtccccggcccacctgcaccagcgtgaactcacatgagcttagcactgtccccggcccacctgcaccagcgtgaactcacgttagcttagcactgtccccggcccacctgcaccagcgtgaactcacatgagcttaggactgtccccggcccacctgcaccagcgtgaactcacatgagcttaggactgtccccggcccacctgcaccagcgtgaactcacatgagcttagcactgtccccggcccacctgcaccagcgtgaactcacgttagcttagcactgtccccgccccacctgcaccagcgtgaactcacatgagcttagcactgtccccggcccacctgcaccagcgtgaactcacgttagcttagcactgtccccggcccacctgcaccagcgtgaactcacatgagcttagcactgtccccggcccacctgcaccagcgtgaactcacattagcttagcactgtccccggcccacctgcaccagcgtgaactcacgttagcttagcactgtccccggcccacctgcaccagcgtgaactcacatgagcttagcactgtccccgccccacctgcaccagcgtgaactcacatgagcttagcactgtccccggcccacctgcaccagcgtgaactcacgttagcttagcactgtccccgccccacctgcaccagcgtgaactcacatgagcttagcactgtccccgccccacctgcaccagcgtgaactcacatgagcttagcactgtccccggcccacctgcaccagcatgaactcacattggctgctctccgctgttttctaaagttgcagcagattctatacagctgataccaacattcttttctaaataattccaggctaaagccgacaagtcaaatatagaagtcaggtggcacgtgataaagagatgaggaaaaacacacttcctcactcagctagcaacacctgcatttaatcagttactgaccagtgtaccattctaaataaagggaaaatagcatgattcaggaatctcttggtcaccaccatgctctgtggtgaaacgctttggtctcaaaaccacccaagacaaagcacgtggcctcgtgtcccctttctgttaaacgcatgctggggaggcgccagatctccttccttccacccccacgtctcccgacctccagcagctgcagggaagagctggaagggaaagtggaaacccaaccttcatgggttagatgggccgatgcttctgtaacactcactagcagtgggacacggtgggacaaaatgtgtcatcacaaaggaggttgaagttgcctttctcgattttctgcaaattagcaatttaaaagtgcttcctcccctgtggattctgcgctggttccttctacctcgccagagcaaacaccggaccgtgtgtctctaacaccggagatgccagagggtacagtgtggggaggactcgcctgatacgaggtcctgtgtccccacatttcctgttggacctaaaggctaaacaggggtgaacgcacaagaggttccaggcgtccactcctggaggcagagtccctgatgtactcaggcagcagagcagccctcctggtcgtctgcagaagagcccccagcgcaggcctcaggtggtcccggccacagctcctggccagctcagcggcagcctccgcccggggtcctccaggcgggcaggccctgcttctgaattcagcatcgactccctcctagaggtgctgctccacggtttcctgaatagtttcttgaaccggaaatcaagtcacctccaagaccacacggcggttcagacggagttcgcgagaccacgcacaagacaggcgcggacgtggccagcagagccctcgctcatccgcctccagtctccaagtgaggtgggttgcgtgtggggcctcagctgttgagggataaacatctgtgtcctgtgtagagaccgggctctctgtgcggagggaaaagctggcaactgtgcagggccccaaccccaccaggagaagaggactctggcccaggggtgaatccacgcgtgttaacacgcccccggggctgagactgcggaagctgcgggttcctggtgtgggtcaggcctgggtaaggggcctgagggtcatgatgcccgcaacatcggcatgccctggtcaccttctgcagccggacaggcagacgctgtgatgctgaggagtgaccagaacgctgtggccacggggcctgggccgtgctgctcaggggtgcaaagcgctccaactcctgccagacacatcggccggcacagagggcagcaaacggctactgctggccaggatcaaagcagccggcagctgcaagaccgcagtcctcgtttcaggagcaagacgtcccccaaggtcgtgggacctagtcaaagggcatggaagccagtctgaaaggtccctcgctggccaaatcacagacagtgtgaacatcacagtaagtgacagtaactaatgataactcaaataaaacagaaaccatggagtccacacacacatagaaactgtgaagtccacacacacacagacaccgcggagtccacacacggacaccgcggagagtccacacacacatagaaactgtgaagtccacacacacacggacaccgcggagtccacacacggacaccgcggagagtccacacacacatagaaactgtgaagtccacacacacacggacaccgcggagtccacacacggacaccgcggagagtccacacacacatagaaactgtgaagtccacacacacacggacaccgcggagtccacacacggacaccgcggagagtccacacacacatagaaactgtgaagtccacacacacacggacaccgcggagtccacacacggacaccgcggagagtccacacacacatagaaactgtgaagtccacacacacacggacaccgcggagtccacacacggacaccgcggagagtccacacacacatagaaactgtgaagtccacacacacacggacaccgcggagagtccacacacggacaccgcggagagtccacacacggacaccgcggagagtccacacacacgtaagaagagcagagtcaaggcggggctgagggtattccaggtggaggagatcacagagacacagtaactaaatgcagcgcgattctgagcaggggtttctccgacggcaccactgggacagcctggcccggcaccgggtgccagtcgtgtccgggtgagtacatccctgtcgtgacgggaggccgtgggctgcaggagaatgttctttgcaggacgtacacacacgtactcggggtgacatgcacgatgctggtggcctaagccaatggctcagggagaacaaaaagttctttgcagtatccttgaaactttctgtgagttctgatggtttcaaaggggaaagagaaatgagcaaaaagatgtaaacacttttcacagaaaagaaaacccacatggccaagaacagaagacgacgctcaccataacccgtgaccaggaagtgcaaatccaggcacagagaggccccctttgctcctgctcagccagcaaaagtgaaccccccggaattctaagtgctggagaaccagcgagagcgtgggtgttcgcaggcatcactcttccgtgccctgggagctggcaattccacttccaggtacaaagctaagaggaacccacatgcacagccagaggtgtgtggacaggccacagcagcaccattcctcaaagcaaaaacctggtggcagcccaaaagcctgtccacaggaggaaagacggatgtacacggcaggtttgctcagcagaatgctgtacagcagagaaaccaaacaaaccgcagaggacagatacacagagcggggcagggagcctgcagacaaacccaccctcaacagacacacagagcggagtggggagcccacagacaaacccacccttcacagatacacagagcagggcagggagcctgcagacaaacccaccatcgaccgatacacagaggagggcaggaagcctgcagacaaacccaccctcgacagacacacagagcagggcggggagcctgcagacaaacccaccctcgacagacacgcagaggagggcaggaagcctgcagacaaacccaccctcgacagacacacagaggagggcggggagcctgcagacaaacccaccctcgacagacacacagagcagggcggggagcctgcagacaaacccaccctcgacagacacacagagcggggcaggaagcctgcagacaaacccaccctcgacagacacacagaggagggcagggagcctgcagacaaacccaccctcgacagacacacagagcggggcagggagcctgcagacaaacccaccctcgacagacacacagagcggggcagggagcctgcagacaaacccaccctcgacagacacgcagagcagggcggggagcctgcaggcaaacccaccctcgacagacacacagagcagggcggggagcctgcaggcaaacccaccctggacagacacacggaggggggcagggagcctgcagacaaacccacccttgacagacacagagcagggcagggagcctgcagacaaagctaccctcacaccgccaagtgattttcaacaaaggcatcagcacaattccatggagaaaagaaagctcttcaataaatggtgctgggactgaatattcacatgaaaaaaactaaccttgatatttacttcatgccacatacggaaattaactagagatggacaagagacgtcgataggacagtcaaaactagaagctaccagaaaaacacaacttctccttcggggtgagcaaaagtttattaggaaaaaatttaactagaaaacagtaaataagttggacttcactgatgttaacatcttctgctcaagacaccattaaaatatgaagaggggccgggcacggtggatcatgcctgtaatctccatgctttgagaggctgagacaggaggattgcttgtgcctgggaggctgaggctacagtgagtcgagattgggccaccacactccagcctgggtgacaaagtgagacgctctcaaaaaaaaaaaaaaaaaaaaaaaaagcaagccacttacagggaaaaaatatccacaatctatatacctgacaaaggacttgtatctagaatatgtcacaaaactctgtaactcattaatagtaagataaacaggccaggtgtggtggctcacgcctgtaatcctagcactctgggaggtcgaggcgagcagaccacctgagctcaggagttcaagaccagccttggcaacatggggaaaccccatctctactaaaatacaaaaaattagccaggtgtggtggtatgcacctgtagtcccagctactcaggaggctgaggcaggattgcttgaacctgggaggcggtggttgcagtgagccaagatcgcaccactgcactccagcctgagcgacagagtaaaacttcatctccctcagaacgacctgcacgctcccggctctggtcccatggcagccggggataaaaggtaagaggtgagatatgggcatttcatgaaagaagatttatgaatggccaataaacccacgaaaaggtgctcaccaggccgggcgcggtggctcacacctgtaatcccagcactttgggaggccgaggcgggcggatcacgaggtcaggagatcgagaccatcctggctaacacggtgaaaccccgtctctactaaaaatacaaaaaattagccgggcgaggtggcgggcgcctgtagtcccagctactcgggaggctgaggcaggagaatggcgtgaaccccagggggcggagcctgcagtgagccgagattgcgccactgcactccagcctgggcgacagcgagactccatctcaaaaaaaaaaaaaaaagaaaaaaaaagaaaaggtgctcaccatcaccagccatcaggaaaatgtcaaaccacagtgagacacacatcagagctactagaatcatgaaaattaaggccgacagcatcaacgccgcagagcccacactctgctgacgggaaggcagaacagtacgaacgccggaaaactgttcagcaggttcctttaaggtaaaaacacctttccctctgatgtgccaattccacccctaggtacttcccaaggtacatccacagaaagacagacaagaatgttaatggcgtctttattctagtaacccgaactggaaactacagcatcgaaacaatctcggtgcagtcacagaaggatgagcaaacagtaaggagccaccaatacacagccaccaatacacaagctgtaacgcatgaccatccggctgagtggaaagagaaacacgagggcacggcgtgcggtttcacgtacgcatgaaattcaagagctggcaacagaagccctggggctccaagtcagggcagtggctgccgtggggaccggagccgggagcatgcaggccgttccgagggacagaagtctctgcaccttgactggggtgtgagttacacaggcgtgtgagctgtcaaaacacacattatccatgttgtacacaaatttcacacggaaatcctgcacttcactgcatgtaaattctacctcaattctccaaacctgaataaactataatgagatgcaacaacgcggatggaccttaacaattataaggtttaaaagttccagaatactacagtggtacccactttataaagttaaaaagaactgaagttaaattttttttttcagatttgtatagataccagatagttattttaaaaggacagcaagggatgatgagcgcggaatttgggctgacggttacccaggcggaaggaggcaggggataagcatcgtggtcacctgtgagacgtgagaagaccgagctggctcttgtgtcaggtggcaggtccatgggtgtttgtcacacgatgaaaacaaaaaatacaggtgtggagtcctaattagggaagagaagtcaggctggggggagccggggaagcaaaaagaattcgcagattggctatgtctgcctttcctcatggttcaggacacagcgcgtctgcacgaataactcacctaactcacaatcctcctccacccaacgtatcaccagatcctcggctgagaggaaaatgcaacttagctccctgcaaccctggcgttaccagcaccgctcgtggccctctccagcgcaagcaccacctttaaaacccccggcaaggctctgtctcctgccagtcagcttctctcttgctgacgcgcccgttgctttcttgcaacctatcttcctgctttctcgaataaatctgcctttcttgacctacaactgtcttggtaaattcctttaccacctgcaccactggcctcagttagtcgctacccacgaaaacaggtacagttataatcacagagacaagtaaaacgggccacgcgtgaacaaatgaggagaatgtgtcctgaaccaagggtcgtgattaatttgattctgggctcctgagatcctaagatctaaatttaaaaagaagaaaaagaaatcatagtggaagttaggaaacacaactgaataataactagggttttatattcaaaccttacggacacccctacagtactaagttctccatgagaggaaaatcttatgttagaaacaaaagcctggagaggagggcccagctcaagggttaggaacacaactgcagaatgagcgcgaataaagcagaagcaaaaccacaggtgggaaagtaaagaaataaagggattagcggagaaggaggcaaagggcagctgtagaggtggaaaggagaacagcctctgacacgggacaggccttgggcgttgcaggctgtgctcagagcacctgccggcttgtgagggttctagacggcactgctgctcggggtctggggcacggctacagccacatccctgtcccctcggttcaaggatcggcagtgaggatgagaacggccaggcttgtctgtaaccctccccacagccccggcgatgactcgacaatgctgtagagccggccgaatggatgcagagcctttgggccgtccccgtctgcagcgcccgccccgccttggcccttctcatcccagccacatgggcccctctcctctcacctgaggccccagttcagaggcctcggggcggttccgggaaggccatgtggcttcctgtgcacgtggacagccatgcggccggttccccagtgaagacgggagtcgggggacaggagggtggcagaggctctccaccctgggaaccctgaagggcgaagggaaaagaaaacctggtcggctcagaagtaagcagcgctctcacaaccaccagacctcctgggtgaagccgctctgcagatgttttcatagacattatgtttgaacatctctaagaggactggaacccaaatcattataatgaatgagctatttagaggctattttctttaaaagccaggcttcttgtttactttgttttattctactaaagtttccaagaacacagacaaccgagacgagaacacagcagtgtgtgccaggaggaaacgccgcgtcaggcactgatccatcagaggccggcagggaagggtgtaaactcagcgacggccgccagagcacccacgggtccctcgcaggaccagagtcacgttttccagcggggaagggtgtaaactcagcaacggccgccagagcacccacgggtccctcgcaggaccagagtcacgttttccagcggggaagggtgtaaactcagcgacggccgccagagcacccacgggtccctcgcaggaccagagtcacgttttccagcggggaagggtgtaaactcagcgacggctgcccgagcacccacgggtccctcgcaggactggcgccacgtttagacagggctctgcgaggactcacccctctgccccttaggaacctggccatgggacagtcacgggggaggccttccacagcctttccaaggacacctgaggccacctaataggctcgaggacaagccgtctaggcaggtgtcacgtgacgagaacggtgtgcagggaggctccactctgactgcagcaggtgtggggtgggtcccagggaggatggagatgcttcatgagcaaaaggtgaagatctgtttaaaccgtcctcagttgccaacgctagaggtcaggaaccgaatctgttcgactgtaacgccctctgcacatactggatccagagtgagtttcaggtgacgttcacactggtcagctgggcaaaaccccaacgtccttcgaggatgttcactctcgtcctcatcaactccacagagcagccagcacccgggaaggtgcccacaggcccagcctcacaacatctgcagacctgctcctaagccaggcacagaagctgaacaaccgggtcagaccaggccaggcctccgacgcagaccgaactcgggagctgaacaaccaggtcagaccaggccaggcctccgacccagaccgagctcgggagctgaacaacgggtcagaccaggccaggcctccgacgcagaccgaactcgggagctgaacaacgggtcagaccaggccaggcctccgacccagaccgagcttgggagctgaacaacgggtcagaccaggccaggcctccgacccagaccgagctcgggagctgaacaacgggtcagaccaggccaggcctctgacgcagaccgaactcgggagctgaacaacgggtcagaccaggccaggcctccgacccagaccgagctcgggagctgaacaaccaggtcagaccaggccaggcctccgacgcagaccgaactcgggagctgaacaaccaggtcagaccaggccaggcctccgacgcagaccgaactcgggagctgaacaaccaggtcagaccaggccaggcctccgacccagactgagctcaggggcccagcacaccctaatcctgtcacccaaagacaataaaaagcaccattttccatgtggtgggttgagctgtccttggtggatgctgtcttagtgaggaaaacattggatggaccatctgagcatgaaaacatgagcccaaggaagggtcaggagagagggctgaaggttctgtgtaagaaaacgggagaaatctgaggtgttttggtctaagaagaaaagagaagaaagagacccaggcaccaggacaggagtcatagcagctggtgccgccctgggggttccgccttcccgagctgggccgataaatatgcagttttaccccgtctgcacacgggcacgcctctcccaaacttccacatgtaccaggagcatgtgcagaggcttctggtgatcaaggaaaagagctgggtcaggaggagaggaacgggcggctcccgcgtaaatccccgcgtaggcaggagctctgggccagagcggcctggagacgctgagcggcaccccaggaatgcacagaagccccggaacctggccacagaggagggacagatacagataaatgttcctgaagtttattttaaagtaatttttaaatatctatagttgagtgtagactatacaagcgactacctgttattcagtcatttgtcctgctattgaaaagtctttataaacatcacagtgactcccccatggagacctgccggaaacttctccaccgtgaccctcccgtcccatgttaacgtttctgttttccatcacagtcaacaacctgaagcttctttgtatccaaatcgttctcagagatgccaagaaggaagctgaggagtgaaggacactcttcaggctcttgatagaaaatgcaaagttacactgtcaagatggcatcaacttagactgtccaaaatactaagttatatgcttttttttttttttgagacagagtcccgctctgtcgcccaggctggagtgcagtggcgtgatctcggctcactgcaagctccgcctcccgggttcacgccattcccctgcctcagcctcccgagtagctgggactacaggcgcccaccaccacgcccagctaattttttgtatttttagtagagacggggtttcaccgtgttagccaggatggtctcaatctcctgacctcgtgatccacccgcctcggcctcccaaagtgctgggattacaggcgtgagccaccgcgcccggcctaagttatctacatttttaaaagtgttattagttcagtttttaaaagaatctcactaatctgtgtttgaatacaaatgacttaaattcttagaaagtttattagttgtttgtacatccactctgagagtctgcttctgtcctctgcctacttatctatttttcttagtgttttgtttgtttgttttttgagacagagtctcactctgtctcccaggctggagtgcaatggcgcaatcttggctcactgcaacctccgcctcctgggttcaagcgattctcctgcctcagtctcccaagtagctgggattacaggcgcacaccaccacgcctggctaatttcgtatttttagtagagacagggttttgccatgttggccgggctggtttcaaactcctgacctcaggtgatccatctgcctcggcctcccaaagtgctgggattacaggcgtgagccaccgcgcccagccttttcttagtgttttcttatcaacctttagaaatcagtaaggttattcatcttttaagtaccatattttccgatttcatcccagtttatcttcattttgctcacatcgctctctgctgtgcaattttacatttttatatatcttacttaccatgattaactcattaagtgctacagcaattaaacagcaacaacctattgaccttaatttttaaggttgtctaataactatttgataaggttgggctgtgtccccacccaaatctcatcttgaattaataactgataaggttgggctgtgtccccacccaaatctcatcttgaattaataactatttgataaggttgggctgtgtccccgcccaaatctcatcttgaactgtagctcccacaattcccacgtgtcgtgggagggccccggtgggaggccactgaatcacgggggcgggcatttctgttctagtgatagtgggtgagtctcaggagagctgatggacttcaagggaggagtttccctgcacaagctgcctctctcatcggccgccacgtcagacatgcgcgactgtgagacctgcccggacacatggaactgtgagtctattaaacttctttttctttataaattacccagtctcggctatgtcctcatcagcagcatgaaaacggactaacacattattagtctaataaccattagaaaaatgattttcaagaaccgcactaaaatgtaagatcatttaattattcaaccaacatgtacacatttatacattataaacaaaagaaagttacttaccgaatccaaaaagcaaaggtaagaccctgagctctgggcaactgcttgatttttagcgtatccgactgtggaaaaaagaagagcaaaactcttttataattcagtttccagcagcattctctttcatagagcttagtatatgatattctttttttttttttcgagatggagtttccctcttgttgcccaggctggagtgcagtggcgtgattttggctcactgcaacctccgcctcctgggtccaagcgattctcctgcctcagcctcctgagtagctgggattacaggcacctgccaccacgcctggcgaattttgtatttgggggtttctccatgttggtcaggctggtctcgaactcccaacctcaggtgatctgcccacctcggcctcccaaagtgctgggattacagatgtgagccaccgcacccgcccaatatacgatgttctataagaaagctaggaacattttgcactgccaccaaaaatgtgggtcagctttcaaaggaatgaaaggaaagtcagagagagacaatattccacctttggtaggtggcataatgagaacaaggataaaacacagagtccactgggtacttcattaaagtctgacactcactgaaggaaaaaaaaatgagatggacctttactgagtacagcactaagctaagtcctgggaatatttttttaaacaaaattaaaatatccctggaaggaagtctgtaaagtctaccctgatgaaagtcaggatccggtcacaagagggaagttgggggctggcacatgtgtgacgggctggtggaggtcactgaggtagaccctcggagggcggtttgcacgtgtgtgatgagctggtggaggtcactgaggtagaccctcggagggcggtttgcacgtgtgtgatgggctggtggaggtcactgggctggacgcgtggtgggtgatcctcttggcgtgcatctctgtgatgagctgaatgtgctgccagcatctacaacaccagagtgggtgcacatcccatgacccagctctgatcctaacagatactgtgcggcgtaaacccagcagaacttaatctgcatggccaccaagagcagcactgtcatcagagctcaaaactgggaactacccaagtgcagaatggaaaagctggaaacatacatgacaagaaggcaccctccagggctgtacacacagcgtgggtgcctctcccaggctgctaagcagagaagggagcagctgctgggtgggggccctggcccggagcacgagggcagccgaaattcttctgtgctgtgagaaactaggaaagcagctgcccttggggaagggggtgaccagaggggcctgagggggcttctgggggctgcgatcttctgttcttcctcagggtgccggttacatggtgtgtgcagcttatgaaccttcatccagcagtaagactgtgatgtgcacttttctgtatggatatcatattttaagaggagtttcaaaaaatctctgtcttcaaagacatcacaactgagctggaaaaggctgaacgatgacctgtggttaaacgccaaaggaacgggactgaaaacggggatagggaggcctaaagggtccctgttagggagctgtggcaagagcctgaggctgttaagaacgtgaaccagcagaagcaaggcagcccagggcagaccaccgtcctgggtgctgccctgtgggcggtgggcagtctgggcagccctcattatctggggcagcctatgtttgggaaagcaggcactgggcagctttgtgggaactgcatgttgggctaagaaggctcaacttccccctgccagcaggggtagccaaggaaggcttctgaacaaggagtaacaagcagaaattcatgcgtggcaagctcagcttcgatgccaatggcgggtggatcagaggtggcatttagcccaaaatgagggtgctgaggaggctccaaggggcaggatacccactttccctagaaaagaggctggcaacaccggacagttacagacatcatggcacccaggaaagtcatacaaagcaaaacagacgtgtgcagaattaagcaatagatctctctggtatccaaatcaagacaagctgcagaaagttgtctgttggagggacagtggccaagtgtgcatttcggccacacccgtggcactctcccgtctccactacaaggaggggaaggcagggctcccaccccacgggggctgccctgttccgggggggcatcgagcaagctcacggcaccactgggaccgcacagccgcacagaagcgagacgcacagagtctcccaccctctctgcgttctccaacccggagcagtgcccctcttcataccaggtagcagtttaatttctagcattaatccctaaagtttagccagctcaacccagttagccagaggatcccagatgtcaaaaagccaggggcataaacaggcgcagggaggaaatgcacccggggaggcgagcgcctgttctgccctgggatggatggtgggccgtgtctccagggccgctgcagccaagcctccatcatcgctgcagggccaggtgagtgccctgaagctcctcacgagaaacacaggcggaggcacctgtgaggacgaagggccggaaggggccttccacgaggcacactgttcaacaggggctctgctcacaatgcggcttgttagcgtcaggtttcaggagagaagggtatccgtgagcctgggtaacgaaggaagacttatctcactaaggaagctggaagtttctcacaatgaatcctgtgtttggcagagacaaggaatttgctttaatattattgccttgaagaaagtcaaatgtttgcgtggggctcctgcttggggaggccagtccctttgtgaggggatctggttgccatggtctcagcaggaaaaactcacacggcggcgagatattaacattccttcctcctggagagaagagtggggattgtacttcattttggttttagcaagcggcgacgttattaggaaagtggggctccgttagtgcatgaatcgtaataagtgaatcagcccatttcaaatacccagcacttctgaaaagagacactttggatctatgttatctaatagtcaatataactctccctattcaagaaaaaatatcattacaggaaaatacgtccctttcagctataaccaaaccaaccatattttattaaagtgtagaatagggtccccacgaggtctccttacccacacttcagacaggcagcaggacggctcatttcagcccttcacctcggtccttcagaactttacaacggattgtttttattattggcagaattcatacaaatgggatatgcctcaagttagagctaatctataaaaagtactttatgaaaagcaaaatgttttcaaaatagatgaatgtttttagacaaggagtgtcacaacagtcaccaaaatactttaaatttgttttcatccaactataaaagatgcaaaactctctctaatattctttaacttaaaagaatattaggccgggcgcagtgtttcacacctgtaatcccagcactgtgggaggccaaggcaggcggatcaggaggtcaggagatcgagaccatcctggctaacacggtgaaaccccatctctactaaaactacaaaaaaattagccgggcgtggtggcgggctcctgtagtcccagctacttgggaggctgaggcaggagaatggcgagaacctgggaggtggagcttgcagtgagccgagatcgcgccaccgcactccagcctgggcgacagagtgagactccatctcaacaacaacaaaaaaatattaaaagatgtttatagtagtttcaaaaaccaatttgtttacacacattacagaagcaagttgaaacagatgttctacaataatcaatttataaagagttttctatttcaaaccaacgaaagataatgaaaacaagatataacttgggaaaaaacatcttccaaatacacaagacgatgatgatgacagcaatgatgatgacagacagctgccaacacctcctgagtgcccgctgcccaccgtccatcccagggcagaacaggcactcacctccctgggtgcatttcctctctgcacctgtttatgcccctggctttttgacacactgctgagcgcccgccgcccgcccctgttctagacacactgctgggcgcccgccgcccgcccctgttctagacacactgctgggcgcccgccgcccgcccctcttctagacacactgctgggcgcccgccgcccgcccctcttctagacactgctgggcgcccgccgcccgcccctgttctagacacactgctgggcgcccgccgcccgcccctcttctagacacactgctgggcgcccgccgcccgcccctcttctagacacactgctgggcgcccgccgcccgcccctgttctagacacactgctgggcgcccgccgcccgcccctgttctagacacactgctgggcgcccgccgcccgaacctgttctagacacactgctgggcgcccaccgcccgcccctgttctagacacactgctgggcgcccgctgcccgcccctgttctagacacactgcagattagctcatttcacacctcacagcactccaagatgggtgctgactaccacgacctgttcacaaataaggaaacggaggcagagcgaggtggccgtggagccgaccccaccagcctggccccacacccaagtctactttactcctgcgtcttctgagccccagggcactgcaggagaagagctggggccaggagctgctcctgtccactgagacaccccgcaggtgagcctgtgattttgtgagtctcacagatctgaacaggacccaacagaggacttaactccccaggctctcacatggggacattccagagggaccgtaaaccctcagccgcttgcccttgaaatacgtcatagctgtaagactccctcaggaccaagtccactagaaagtggggtgatgccacccattcctgagcacattctaaagcagtggctcctgatcctggatgtgtctcagaatcttctggaaagcttttaaaatcccaatgcccacgctgcaccccagaccaattacatgagaatatcttagggtgagactcaggcactggttttctaaaactcactgatgattctaacgtgcacaaagttgacgaccattatcttagagaagctgtgactcctaaaatctgtaggaacccgtccaccaactaaaaacgtatcatctgccaaccttgactttttcagccccatgcaatataggcaggcatatttttttcaagtcttatatggaaactttaaagtcaaactaaaaggaccctgatctattacaatcaaagctaagaacacaagctaatcattcaacataaaaacagagggtgaatgaagaaacctgaacacagcttgacccagcatcatgaaatttcaaaattcaaaagtacaaaaagaaaaatcttaaatactttgagaaacaatacctttaaaataacaagagtcagactggtgtaagatttcttattagaaacatggacactagaatataatgaggcaatccctttaaaattctaagaaaaattattttgcacctagaattctatacccagccaatctgtcaactgagcataaaaatattcttgagcaagagaaataagcagaaaaaaagtttgaaaaaataatggctgaggctgggcacagtggctcatgcctgtaatcccagcactttgggaggccgaggcaggcggatcacaaggtcaggagatcgagaacatcctggccaacacggtgaaaccccatctctactaaaaaatacaaaaaattagctgggtgtggtggagggtgcctgtagtcccagctacttgggaggctgaggcaggagaatggcgtgaacttgggaggcagagcttgcagtgagccaagatcatgccactgcactccaggctgggtgacagagcgagactccatctcaaaaaaaaaaaaaaaaaatggctgaaaaattctcaaattactaaaattttactggaggagctcaagagtatatttaaatatgcagaagaaaaattagcaaacacagagatagatgggtaagtctgaatctgaaaatggagacaaagaagaatgaagaaagtgaaaagcatctcagagaaagctggaataccaataactataccaacatatgcacaatgcaagtaccacacggaaaggcaagagaaataagcagaaaaaaagtttgaaaaaataatggctgaaaaattctcatattattgaaaaacattcatctacacatccaggaagctcaacaaactccatgtaggataaacacagaagattcgcagctaaacacatcatagtaaaaatgctgaaaccaaagataaggacaaaatattgaaagcgacaagagaaaatcacttgtcacttacaagagaccctcagtaagattaaccgcttacttctcatcagaaacaatgaaggccacaggcaatggggtcacacacagatgctcctcaactgagggtgagcctatgtctaggtaaacctgctgtaagtttaaaacatcataagtcaaaaatgcttgggggcctgggagctgtgactcatggccactgcctggtatcctgacagaaccatggtttctactgaatttgtgttgcctttgaccatcataaagttgaaacatggtaagttgaactatcacaggctgggggccatctgtattcatagtgctcaaagaaaaacactgtcaattatgaatcctatatccagcaaagtcatctttcaaaaatgaagaagcaagtaagagattctaagataaacaaaaactgaggcagttcattgtagggctgaaatgaaagggcactaaacaggaactcatagagaaagaacaaatgaagaacagggataaagtttactattcaggtaaatataaaagatagtactattttggtttgtatttttcctatatgcttttaaaacaaatacagaaaacaagccaggtgctgtggctcatgcctataatccccacactttgggaggccaaggtgggtggatcacttgagtccaggaattcgagaccagcctgggcaacaggacaaaaccccctctctaccaaaaatacaaaacttacgcaggcgtgctggcaggcacctgtattcccagctacctgggaggctgaggcacaagaatcacttgaacctactgggtggaggttgcagtgaaccaagatcacgccactgcgctccagcctgggtgatggagtgagcccctgccccctactgccacacacacaccaggaaacaattataaatctaaatctacattcatgaaaataatttatgaatttatgttaatgttacatgattgaagctaagtgttaattcaaactacattgttataaatttaagatgttcaccgtaatcctcacagtaaccactaagacgatcatttagaaatacacagaaaaggaaacgagaagggaatcaaaatggcacatcggaaataagcaattaaacagaaaagaaggtagtaatacaggattgaggaataaaaaagacataagacatatagaaagcagatagcaaagtggcaaaagtccttccttgtcagtaatcactttaaatgtaaatggactaaattctccaattaaaaggcaaaatctggcagaacggatcttgaaaattatgatccatctaaatgctgtctatatgaggaattcacttcagatccaaaggcacaagtaggctgaaagtggaacaagggaaagagatattccacgcaactagtaatcaaagagtgctggcgtggctgtactaatatcagaaaaaatagacttcaactcaaaaattattagaaaagacaaagaaagagtcaattgatcaagaagatataacaagcataaaactgtacacatctaacaagagggtcacaaaattaagtaaggcaaagattgactgaattggagggagaaacagttctaccgtaacagtcggagattcaacattctaccttcaataatggagagaacatctagagagaagataataaacagagaacttgaacaatactataaaccaactagacttagcagaaatatacagaatactccacttgacagcagcagaacacacattctcaggtgtgcacagcgcattctccaggacaggtgacacgtccggccataaaatgtaccttaaacatttgtttaaagattgcaattatatgaagtatcttctctgaccacagtgaaatgaaactagaaataagtaacagaagtaaaactgaaaaattcataaataaatgaaagctaaaccatatactcttcagcaaccaatatgtcaaagaagaaatcataaggctaattagaatatactcagagacaaacgaaaacaaaaacacaacaaaccaaaactttcaggatgtagaaaaatcagtgcatagaaaggaatttatagctataaatgcctacataaaagaggtctaaaatcaagaacctaaaagtacaccttaagaagctagaaaaagaaaaataaactaaacacacagctagcagaaggaaggaaacagtgaagattagagtgaaaataaacaaacaatgacaaaacaatagcaaatcaacaaaaagagttgattctttgaagagggtcaacaaaattgacaaacccagctagactgagaaagaaggaaagacagctcaaaatgctgaaataaaaagtggtacatgactcccaaacttaacagaaactaaaaggattatgacagtgtgaaaaacaacatatgccaaaaaagttagataacctagatgaaatggacaaattcctagaaacaaactaccaaaattgactcaagaagaaataaaaaaaatctcaacacacctataacaaataaagagattgactcagtaataaaaaaaacaaaaactcccaacaaaaaagcccagagtcaggtgacctcactgatgaattccaccaaactcagagaattactaacaccaatccttcccaaactcttccaaaaaacaagaggaagaaacacttattctatgaggccagtattactctgataccgaagccacacaaagatatcatatgaataggaacctacaggccaatagcccttacaaatatatatatgcaaaaatcttcaacaacatactagcaaactgaatccagcagtatactagaaagattttacaccaggaacaagtgggatttatcccaataatgtgagggcagttcaacataggatatcaatcaacgtaacataccatcttaacagataaaggggaaaaaactatatgatcatctcaaattggtgtcaaaaaggcatttgacaaaatccggcaccctttcatgatttaaaaattcaacagactagaattaaaaggaaacctccttagcgtaagaaatggcatttataaaaacctacagctaacgtcatattcaaaggtgaaagactgaaagcttttcccctacaattgcttgggagaaccgaagcgaggatgcccactttcaccacttctattcggcaccgtcctggaagcaccaaccagagcgatgaagaaagataaaagccaggcgcggcggctcacgcctgtcatcccagcattttgggaggccaaggcaggcggatcacctgaggtcaggagtttgagaccagcctggccaacatggcgaaaccccgtctctactagaaatacaaaaaaattagctggttgtggtggcgcacgcctgtagacccagctgctcgggaggctgagacatgagaattgcttgaacccaggtggcggagcttgcagtgagctgagatcgtgccactgcactccagcctggatgacacagtgagactctgtctcaaaaaaaaaaaaagaaagaatctaaattgtaaaaggagaagcaaaactatctctactcatagataatatgatcttaaatacaggaaatcctaaaaacccacaaagaacaaactattaaagctaataaactattagagctaataattgtaggatacaaggtcaacactaagagaaatctgttgtttatcccctagaaatgagcactctcaaagaaaattaagaaaacaattcacaaaacttatcacaaagctcaagtaatcaaaacaatgaggtactggcgtaaggacagacatatagaccaacggaatagaatctggagtccaggaatgaatccatacgtttatggttaatggatttttgacaagaataccaagacaattcagtggagaaagaatagtcttttaaatggtgttggaaaaactgagtatctacttacaaaagaatgaagctggacctttgcttcacaccatacataaaaattaagtcaaaatagatcaaaggcctaaatataagagctacaagtataattctgaagaaaacatacagataaaatcttcgtgaccttgatttagccgtggcttcttagaaatgacaccaaaagcacacgccacaaaagaaataatagataaattagatttttgtcttcatcaaaatcataagccttttgtgcatcaagggacactctcgagagggtgaaaagataacccaaagaacgggaaaaaaattgcaaattatatataataaagctctagtgtccagaacatataaggagctcttacaattcaacaatgaaaacacatacagctcaatttttaaaatggccaaaatacttgaataaacatttcttcaaggaagatatacatttatttatttatttattattttttgagacggagttttgctcttgttgccaggctggagtccaatggtacgatctcggctcacagcagagatcgcgatctctgcctcccgggttcaagcaattcttctgtctcagcctcctgagtagctgggattaaaggccgctgccactactccaagctaatttttgtatttttagtagagacggggtttcaccatgttgggcagcttggtcttgaactcctgacctctggtgatccacccgccttggcctcccaaagtgctgggataacaggcatgacccaccaaacccggcccatttattttttattatttattttgagatggagtctcactctgtcacccaggctgaagtacagtggcaccatctcggctcactgcaacctctgcctcccgggttcaagcgattctcctgcctcagcctcccaagtggctgagattacaggtgcatgccaccacacctggctaatttttttttgtggtatttttagtagagatggggtttcaccatgttggccaggctggtctcaaactcctgacctcaggtggtccacccgtctcggcctcccgaagtgccgggattagaggcgtgagtcaccatgcctggcccaaggaagatatataaatggccaacaagcacacgaaaagaggcacaacatctttagtcaacaaggacattcaaatggaaaccacagtgagacaccacttcacacccactagcatggctataatttaaaaaacagaaaataacaagtgttgatgaggatatgtagaaattggaacgttcatacattgctggtaggaatgtaaaatgcatccactgtggaaaagtttggcagctcctcagtatgttaaacacagaattacaatatgagccagaaattctacaccaaggaatatacccaaaggatctgaaaaccagtgttcaaacaacaactgtacacaaatgttcagactgtcatcattcacagtatcaaagggtagaacaactcaaatgtccactgcctgacaaacagacacacaaaacatggtacttatgtacaactgcatatcatcctcccagaaaaaggaacggagcacgatacatgccacagcacagaggaacgttaaaacgttatgctaaatgaagccggttacaaaagagcacgtggaacctgactccattcacatgaaatgtccagaacaggcaaatctacagagacagaaagcaggcgagtggttgccagggttggaagagcctgcgtgccaccgcagaataccccagactgggtggcagaaggggcttctcacagttctggagcctgggaaatccaagagtaacgctccagcagattcagtgtctagtgagggccccttcctggctcacagaggtgccttctccctgtgttcttacagagcaggaggggtgagggagctctgagcggcctcttttataagggcactaatctcattggtgaggccccaccctcatgtcctaatcacctcccaaagtccccacctaatgtcatcctaatactatcaccctgggggttccaaatatgaatctcggggtgggcacagacattcagatcatagtaataaatccctaccaaagaataagaaacttaggtctataatcaatccttatcaaagaaaaagaaatttaggtctataataaatccctaccaaagaataagaaacttaggtctataataaatccctaccaaagaataagaaatttaggtctataataaatccctaccaaagaataagaaacttaggtctataatcaatccttatcaaagaacaagaaatttaagtctataataaatccctaccaaagaataagaaacttaggtctataatcaatccttatcaaagaacaagaaatttaggtctataataaatccctaccaaagaataagaaacttaggtctataataaatccctaccaaagaataagaaatttaggtctacaataaatccctaccaaagaataagaaacttaggtctataataaatcctaccaaagaataagaaatttaggtctataataaatccttaccaaagaataagaaatttaggtctataataaatcctaccaaacaataaaaaattttaggtctactaaggttctttcttttctttctttttctctttctttcattttctctccctctcctttcttccttctttccttccttccttcctctctttctctctctctttctcttttttgagatggagtcttgctctgtcaccccagctggagtgcagtggcacgatctcggttcactgcaacctctgcctcccgggttcaagcaattatcatgcttcagcctcccaagtagttgggattacaggcgtgtgccactacgcccggctaatttttgtattttttggtaaagatggggtttcaccatgttggccacgctggtcttgaactcttgacctcaaaggatccgcctgccttggcctcccatagtgctgggattacaggtgtgagccaccacacctggcctctactaggttcttaataagtggtatatccaattaccaccaggatactttttgtcagtatttgaacaacatgaaactgtttcggtacgtaagttgataagaaaccacgaattatagtttaataaactaagcatgtttacttaccgcctctaggagagggagaatcgtgccccccaatgatcacgtggacaccagaatcttccagcttcactctccatttttcaatgatagccccagacttgtcctgaaagcagaacactggcaggtcaggaaacttccctccgaacagtcaaccgttgcttacactggggctgagtcacccgacaggaagttcctacaaaccttactggcatcattgaaaacagacagctccatggtaccttcaaagtcctgttgcaaaacagacctcaaacattcgtccagccacggttcagcgttgtggactgggaggataatagactggaattcaaaagaaatggattaacagaagtgtgaaaacttagttccctttccatggctctaatttacctccccttcaccacccgcacatatgccgtgacaaacaaaaggtgtccactccttttctccaggctcttaacatgcttgtaagattctttacgtcttagctttccctgaactgccttctacatgtttttgaaagtgaaaaaaaaactgaaaggactttgggaggccgaggtgggtggattacaaggtcaggagattgagaccatcctggctaacatggtgaaaccccatctctactaaaaatacaaaaaattagccaggcgtggtggcaggctcctgtagtcccagctactcgggaagctgaggcgggagaatggcgtgaacccgggaggcggagcttgcagtgagctgagattgcaccactgcactccagcctgggtgacagagcaagactctgtctcaaaaaaacaaaacaaaacaaaacaaaaaaactgaaaggcatcaaattgttcccaactcaatggtaaatcatgagttttccaatcactgatcagaaacatcattttggttgaaacaagtatctgggtatcttccaactcactcatgaaaataactggttggttttttttttttttttctgagatggagtctcgctctgtcacccaggctggagtgcagtggctcgatctcggctcactgcaagctctgcctcccgggttcacgccattctcctgcctcagcctcccgagtagctgggattacaggtgctggctggtcatgttctaggtggaataagcatttcggcaaaccatgttagaaaacctgcaacaaagtaacccctttaagtaacccctcagcccacaaaaaacaatgttttaacaaagtatcgggcaggaggtgttcaaagaacccagctgagcaaatgggaggcctgacgtccatctctcgattcctttgtcctacacttcgtttcgggctagtgtagctagtgtccttttctcattgtccttttctcatgaagcccaaaacaaaaatttataaagtgggatggagtaaaaccaggaaattcaatgccaacaaaacaactgattacaggagttaagtcttaatttcatacattataatattaagtgatacggagcgatacttaagagattagtctgtcctcacccttaatttatatccaaaaaagaaaagttgaaattgtgttgaaaacacaatttagtcaagttctttacaaatgaaacctcactctgtctcttcctggacttaggttaataagaataaaacgagttctggccgggcgcggtagctcacgcctgtaatcacagcagtttgggaggccgaggcgggcagatcatctgatgtcgggagttcaagaccagcctgaccaacatggagaaaccccgtccctactaaaaatacaaaattaccctggtgtggtggtgcatgcctgtaatcccagctactcgggaggctgaggcaggagaaacgcttgaacccgggaggcagaggttgcggtgagccgagctcgcgccattgtactccagcctgggcaacgagtgtgaaactccatttcaaaaaataaaaattaaaaaaaaaataaaacgagttccctaatttatttacaaatttaccttagtttggatttacttagaggaaaagaaggaaataatttttctcaagatctacaaaatataatgtttctatcaaagatagaccttgattcacctgttaccaattttagtaagactggaataaaaaagaaaaaaggctggaaaaaaaacaaacaaaaaaacaaaaaacagaaaacatgctgagcctttgggcgactgctaatcctacatccctgtggttgttccctgcatcggcctattggctgggtctgaaccctgagggcctttgctccagcctctgccggagcacggggaaggtgttcggggcttaagggcaggtttttagggcacgtgtttggggtaagtgtgctgggcacacaggcaggtgtgtgggcacggaggaggtgtgcaggtaggtgtgtgggatgcgcaggcaggtgtgcacggcaggtgcacgggcaggtatggggcacgggcatgtatgcaggacgcagagcaggtgtgtgaagcaggtgtgcaggcacaagacgtgtgtgtggggcatgggcaagtgtgccgggaatgtgtgacggcagacgtgtggggtgcgaggttgtgtgggggcacacggacaggtgtgcaggcaggtgtggggcacggggaggtgtgcagaccaggtgtgtggggtgcgggagcgaggcaggtgcgcgcggcaggtgcgcgggggcgagtcaggagcgcggggcacgtgtgtggggtgtggggcaggtgtgcgggggcggggcaggtgtgcagggcaggcgtgcaggggcaaggcaggtgcgtaagagcgaggcagatgcgcaggtgcgcggaccaggtgtgtgaggtgcgggggcaggtgcgcgggggcggggcaggtgcgcaggagcgaggcgggagcgaggcaggtgtgcgggcgcggggaaggagcgcggggcaggcgggcggggatgaggcaggtgcgccgttcctccaccccacgaccaggtgagggcgaacggggaactgcctgagctccgagcccggaagcttcaaaatcagaacgaggaaggtcggtgaggaggccacgctcgcgggacgggggcaggaagcgcagccggagctgcagatctcggccgcgccccgcgggctccaatcccgagcgtcccccgcacgcgcagccgcgctcgcccgcggggcctaagggctgctcagggcggagaccccgtaggtgagcccgagaggcggtgcggggctgcgaaccccggagcgagagaggactggagggcggggtgaggggacgcgaggacccagcctgcacggcggggcaccctccccgctggcacctaccacgtgggcctgcatggcctggctctcctcggacgccccgcccacgccggctccgctcatcccgccgcttcggcctacggcgcctgcgcgggcggcaccaggaggcgggtctgaggccaggcaatctccgattggtgcagagcggcgtccataggggtgggcctcccggaggggcgtggaaggggcggggctgctcggcgcggggcggggccgggaggtcgccgcctcagtcttccgccctgggccacgccccggtcccgggtcacctctcggagccgcctccttggcccgtggaagcctcctgctctcccctagggcgcgcgtcacaatctctggtcccccgtagacgccgccgcggggaaggcggggctgtgcgagggcgccgcgctgcaaacccaagccaggcggcctggagttgctgtaaagcctcaagcaaggctgatatgtaaaaggtcgttgcatttcacccgggctgtgggctgtgctacttgaccggggaggacgaggggactgcagggcgtcctttcagacagacgcggtagggagagcagggcgtgcaggacacttgacggccccaggagaggggtgaggccctgaccccaccggggtgtcatccaggaggaagggtgcccggggcgaggtcccccaggagaagtgcccaggcctgaggccttgaccccactgagatgtccccccaggaggaggggtgcccggggttagctcccctaggaggaggggtacccgggagtgaggccctgaccccaccgcgaggtcccccaggaggaggggtgcccaggagtgaggccctgaccccaccaggaggtcctccaggaggaggggtgcccaggagtgaggccctcaccccaccgtgaggtcccccagaaggaggggtgcccaggagtgagaccctgaccccaccaggaggtcccccaggaggaggggtgcccgggagtgaggccctgaccccaccgcgaggtcccccaggaggaggggtgcccaggagtgaggccctgaccccaccaggaggtcccccaggaggaggggtgcccgggagtgaggccctgaccccaccgcgaggtcccccaggaggaggggtgcccaggagtgagaccctgaccccaccaggaggtcccccaggaggaggggtgcccgggagtgaggccctgaccccaccgcgaggtcccccaggaggaggggtgcccgggagtgaggccctgaccccaccgtgaggtcctccaggaggaggggtgcccgggagtgaggccctgaccccaccgtgaggtcccccaggagaaggggtgcctggggaaagacatgacctcagtagctccgggtaccctccacctttgccctcatttccgcctccgcatgcagccttgggaactgcagggctgggaacccggagaaggcggccgggctctgggggagctcagaggtggccttccctgccaggaacacaggccaggccccatccctatctaaccttatacttgaggagcacagagcggatatctccagatttgagtcctgaacgcgcggccgggaaccccagcagttctgaacttgtcaagggagcagcctgccatgaggggtctcccaggcggctgtgaggcctctggaaactccctgcttggaggaggttgactggggacagggccgtgggggtcaataaaaaggactgctgccattagccctgggctgcctgcacacagagattaagcccgcttgggatttgttccagctgatctgaagtaatgagtaattcacaattaatgagcatggctgtaagcagcccttcctggacaaatccttggctgtccaaaactaagattaaatgcaaatcattctgtcaattaaccgttacaacaaagccaaacttctgttaagcatcacttcatagatggttttttttcccttaaattgcctccttgtttgcaaagcctgttttacaagtggactgcttaagtcacatgagtgaaaatgcagccttatttaccgttcagcaaaagctatctgagaatttgcttccagggacttcatgttctccagaggttggggtactaggaatcatttcattgtaaaggactcagtaaaaagtagccctgtagctgccagaatgcgccgtaggctcatgataaggtaggtggtaagggccagaggtcaggggtcacagatggcttctgcccctccacagcacatggtgtccagaactgggcttgcctctcaccttccttcctgtacatttcctggtgccagaaatttgcttttcactgacttccccctaattcaaatttgattagaatctcctttttgggaacattcaaagtgccaaggtgcgtttcagaaatgcagggttgcagaggtggggtcctgaaatccaagggtggtggggcctgagatcactgccctcgcagtaggaagatcctcggggagaggtcagcagagggcccggacagaaggcactgacactgtaccctggagagagacaggaaggaggacctggggcctcagagctggccgggtggagatcgtgtggtcttcgttcagagggaagtgaggtgctgatgaaagatgattgacgtcacgtgggcaccagcagaggaagtgacacaaaacgccccacagctttgggttcactgagtgggcagttgtatttatttattttattttatttttgtagagatggggtcttgctgttgcccagactggtctcgagctcttggcctcccaaactgctgggattacaagtgagagccattgcagatagccagttttctttatttttaattgttgtttgtgcaaaaggttttggcgaatactggctatattcagaggactcagtaccagttgccaggggcctggagtaggtgctgtggtctcaatgtgtgtgtccccccaaaccatatgttgacacctaacccccaaggcgatgtggttaggagatggagctttaaggaggtgactgggccgtgagggctgtcctctcatgacggacgagtgcccttcaacgagacttgaaggagcccttctgtcccttcctccacgtgaggacacatagaaggtaccatctctggggaacaggctgtcaccaaacaccaagtctgctggcgcctggatcctggacttctcagcctctacaactgtgtgcaatacatttctactgtttatcaatcacatggtcagaggtattttgttacagcagcacaaatggaccaagacatcaggtctccaaatcgaagaacttctcagcagccttcagtgctgggtggggagacagaggttccctgcaggtccccacagacagtgttagactcagtgctgggtggggagacagaggttccctgcaggtccgcacggacggtgttagactcggtgctgggtggggagacagaggttccctgcaggtccgcacggacggtgttagactcggtgctgggtggggagacagaggttccctgcaggtccgcacggacggtgttagactcggtgctgggtggggagacagaggttccctgcaggtccccacggacagtgttagactcggtgctgggtggggaggttcccagcaggtccgcacggacggtgttagactcggtgctgggtggggaggttccctgcaggtccgcacggacggtgttagactcggtgctgggtgggttgacagaggttccctgcaggtccgcacggacggtgttagactgggtgctgggtggggaggttccctgcaggtccgcacggacggtgttaaactcggtgctgggtggggaggttccctgcaggtccgcacggacggtgttagactcggtgctgggtggggagacaggttccctgcaggtccccacagacagtgttagactcggtgctgggtggggaggttccctgcaggtccgcacggacggtgttagactcggtgctgggtggggagacagaggttccctgcaggtccccacagacagtgttagactcggtgctgggtggggaggttccctgcaggtccgcacggacggtgttagactcggtgctgggtggggagacagaggttccctgcaggtccgcacggacggtgttagactcagtgctgggtggggagacagaggttccctgcaggtccgcacagatggtgttagactcggtgctgggtggggagacagaggttccctgcaggtccgcacggacggtgttagacttgggggacactgggtccccagtaagaatgattctgatgtgagtgcagctagtgagggctgagttcaagctttaaagacaagagcccaacaggttccttcaacagcctgatcccctagaccttcgtgtgtccaagtctccagaggggatgaacctcaacagacctggttcgacctcccctaggcagtgggtgctgcctggagggcagggtcgctcgagactgtaggagactctgcacgtggtgaccatagcacccccataataaagcagcccgtgagggcagcctggctgttcggcgatgtgtgcactgaggtcatctctcctactctgtctcagctatttaaaggctgtgactcaccatgtggatttaatgacttattaaggagttgcagcccatgctttttaaaaaagtaatctacaaaaaaataaatgaaaaagtcttcaggacagtagacttaagtgcggatgtggtccctcgagttccatttttcagccgcccacattcctgggattcagacctgttggggattgtaggattctagttgcacagggaaacccagagtcaattcaggaggataattctgagccaggggtgggggtaccggcctggagctccggggggtacgggctgatcctacgaaaggaaagtcaagcctgtgaattgcagagcctggacagagaagttgaggtgacggcgttctgcagatccgtgaaattctattacacgtcagagggaagggacggcctcatgtggccccttggagggaccaagccctacccagcgccttgcccaagtcagcacgcagtcagtgttggctccacccacctgcaccgtcaggccttctggaaagagaaggagatccgactgacggagcgtctccaaacttccaagcaaatattacctcgttaaagcccagtgccacatgactgacctggagccacagcctgccctccttccctgggcctacaggaagggggaggttcctgtcaccagaaccgttccgtcatcagccgggcagatgctcgctgtggattctaggtgagcatcaagtactagggaccatgtttgtcttggattcccccgtcccgcctgagcccagaacgcagagccggagtcaggggcttgcacatggagcgtttcacgcccaggaggctggggcaggggccaggaaggagcggggagggggccaggaccagcgtgctctgctgagggtccacatcgagggctggaccctggacctccacaagcctggagaattctccatccgagcagtgaggagcccctgcttgttgtcagctggagctgcgcctcggggcttctgctgtcctggccctggggtggtgactgcaggatcccacaggtgtcccgaggcctgaggctcttctcactgcagaggccaccctgcaggaattggagttaggacccggagggtgggacaggctgactcagaggagccagctctcaggttggcaggaggaggagatgcacaatgagacagcagcctcacctccaggggacggccccgcaagccggagctgccctcctgcacactcagcactcaaggtggatttggaggtgacctaagcccacagctctccaagtcttggggaaatctacagtggatggcaggtgcctgcggacgccgagtgggtgcggccccagttatgctcaatgcaggggcacctgtgttgttagcagctgacgtggacgggaaaggcctgtgctgaacaacgttccgtgttcaattagacactctcctcctaaacaggggcggaagacgtctcatgggggttccaagcgtgatttatggaactcactcccatgagataacataacatttttcacacgtgggagaaagggctgggctcgactggtgcctgagtgaatgctgaggataaatgggaagcaggacattccagggcacctctgcgtcttgcatgagaccttgtgagggccctgtggtgcccctgatgtcactgtcgaaggtggagccgcccccgctctgcctcggcctccctcagatgtcctccccagctggccctgcagcgcacgtggaagacagctgccgagaagcaggtgtgatgccagcctgtgggagaagccacatctggacagtgcgtgaagccagtccaggggccacaccgggacctgccctcagctctgccacgtcctggccaagtggccttggcatgccagccctggtgtccacagaggcatccattcctcatggcaaagtggagtcaagtcggctgatgcaggcgagacacctggccggcctggggagccgcaccagcgctccccacattgcactgctgactgaggggtgctcggtgccgcggcttcacacggtcagtgcacagacatgaacgctggactgagaagccgccgcgtgcacctggcccgccaagttgccagggaggcaagggtggtgttgacgtggatcaccgaaggagctggcagcccagccgtccccgtgactggatggaatccgcaagcgttcctgggcatccactctgggaagggctcagtgccagggcctagggtagttttcaaattgcaggttgtggccagtataccaggggtcatggggtcagtacactgggctctgactggcaattcctaaagatgaagtgtgagtctgtcccatatagtaagagctgcattgatttgtaaagcttgtgttggttttgcacgttctatgccagtgtgtgctggaccgtgatagaaagcgcatttctcgctgtggtgcctgccgtagtctggagggaaagatgagtccgtggctctaatgtggggtggtgggtgtggtctacacagggagagcgaagagcccacatggggcatgagaggggccggagaggctggggcaggggaacccgggccaggtcctgagaacaaatggggttattcagctcctaaaggtgcaggactcagcccaaagtccctggtgacccaaagaggaccatgtgagtctgatgtggctgtggaaggcggggctcacagcaggctgccggggcaccattaatgggggagggtcctgtccccagcgcatacgtagacggcccttcagaacctgctcagtggtcagtgcggccgtgcagctgcaccccggcctggtcacctgtgctgtgcccagcaaggaagatgcccccgctcagcccgtccatgcaccctccagaggctgtcagctgcctgagacccacactggctcttgcaggctagaggagagttcaatggccattcgggccctgtcgccatggaaacaccaactttgggtaccaaaagcctgaatgtacaaattcatggagtatgacctgcctggtgccagtgggtctttgcatttttctggggtgccagtgggtctttgcgtttttctggggtgccagtgggtctttgcgtttttctgatgccctctgaactcttaggtcccggttctggcggatttggcccaggcacccccagcccccaggtaggaggcacaaccctgctcccaatgcccaacacctgcccccaatgcccaacacctgccccacacacctgaggtacctcctgggcgtcccacaccaggacaggcctggagacttccagccactgccacctggcacacccagcacctgcagatccaccaccttaaaacccacctctactgccccatgtcacggtccctgcggggccaggcctgcctggcacgtccaccccgggtctccctgcctcaccctcttgcgcatccacagtgaacaggggcatctttccaaaatgcagatctggccgggtgcggcggctcatgcctgtaatcccagcactttgggaggccgaagcaggtggatcacatgaagtcagaagttggagactagcctggccaacatggtaaaaccccgtctctactaaatgtataaaaactagtgggatgtggtggcggctaactgtaatcccagcttcttgggaggccgaggcacaagaattgcttgaacccgagaggcagaagttgcagcaagctgagatctcaccactgcactctagcctgggcaacatagcaagactctgtctcaaaaacaaacaaacaaaatgcagattgaatccaggctcacctggtgacagctgtccatatccccaccctttcaggacagcatggctgcccttttgtgggtggttccagctacccagaccctgtccttctcaacaccccctcattaaggtaggaccctaaagtgaattcctccttgtccttcaaagccagcctccagcatcgcctcctctgggatcttctctgacttcccagtcggtttcagaagcctctgatgaccccatgcggagaagactgctcccctcactgctggcacacggcagatgctcagtaagtatcgttcaatgactgactaaatgtctcataatatccttcataaacaagggcctggtgtggattcataaatgggtctctcaaagtttaattggtgagactctgttgtatcagacaatgaagggttaaaagataatattcaaaaaagtaaaatcatgacacacaaatctagaatgaacacacattgataaggtttggatctgtgtcctcacccaaacctcatgtcgaactgggatcccccgtgtcagaggcggccgcgtgggaggtgaccggatcgcgggtggacccttcatgaagggttcagcaccatccccttggtgctgtcctgggacagagttctcttgcgatctggttgtttaaacgtgtgtggccccttccccctctcttttcctcctcctcctgccgtgggagacacttgctccagcttcgccttccgccgcgagttgaagctccccgaggcctcctcagaagcagaagccaccacgcttcctgtacagcctgtgggacccggagccagttcaacctcttttctttataaattacccagactcggccgggcacggtggctcacgcctgtaatcccagcactttgttgagaccgaggcaggcagatcacgaggtcaggagatcgagaacatcctggctaacacggtgaaaccccgtctctactaaaaatacaaaaaattagccgggcgtggtggcgggcgcctgtggtcccagctactcgggaggctgaggcaggagaatggtgtgaacccgggaggcggagcttgcagtgagccgagatcccgccactgcactccagcctgggcagcagagcgagactccatctcaacaaataataataataaaataaataaataaataaataaataaataaataaattgcccagactcaggtatttctggatagcgatgcgagaatggactaatacacgtgttaagtcaaaagttttatttaacttattaattcatgagggaagcaggaagatattaaaactggttcaaaggaaaatccacaggtttaggcaatcgagctgaaacgaacttgctaatacagtcgtcccccgtatccccgacttgagttgtctgtgctcaactgcagaaaacaggtgagtacagcacagtaagataccttgagagagagggagatcccacattcacataatttttatcaccatagattgttgtaattgctgtttatgattggtgattgttaatctcttactgtgcctattttacaaattaaactttatcaaagggctgtacatataggacaaaacatagtctatacagggttcaacactatccaaggtttcaggcatccactggagtgcttggaacgcatcccccaagtcatcaccaaaccagccaatatccacagggcctgaaacctcccctttggattctctcttccattggtggaaatcagccgtgtctccactgacaagtgtccttgcacctccgtgggctcctgtgtgtggccgtcacctttctggtgtgcagggaactgtctcacagctccattaaagatgaggaaggcgccgatcactgcagcaccagagaacccaggggttcgcctggccccccactgaaaggatgcccagaaacctcctcacccattttaatgtctttcccacattttcctgatgaagactcagcacagacgctcacagcatcattgggcacaactgggtctggtggcagaaggcccggagggtgcacggccccctcctgaggcaggtgtgcggtgctggggaaaggcggagcacgagggctgagctctggccgtgggacccacccagcagtctcccctctggggcagggaggggcagtgagagcgtggggaaggcagggaggggagcccaacggtccaccctgggaggagccatcagcccccatccctcaaccaggcgtctccacaggccaccagggccataaaggcaggtaggacccacacctgctgatggggaactgcaccagcagccacccagaaacccgaggcctgtacggtattccgtgccggggagggccagcactcagcccccagctgcttccctgaaccccacggtctgaggctgtgtcaaagcttccccagtgtttcctggaagacgctcctccatggatcccttgctcctgcccatcttgctgggccaggaatgcaaactccaatggctgccccggggtcgtttctcaggggggtgtgcacgggtgtgtgcacggtgaccgatgcctctctctgggacgaagagctggcacactgtctgcctgctgtacagcagcggcttcccagagctgagggcctctcctgtgggcagtcccctgtgtgggcagcatctgtctgagcccccgcacatcgctgctggggaaggggcttgggagcccactcaaggtgctgaccctctggttctgcttttgctgtgagtgattaagatcctctatctctgaccccagcagtctggtgcttcctgccagcacccacgaaacaggcaggcttgttagcccgaaagtaaaatctcaggcccctgcacagttcagacggcatccagcacagttggggctgggccctgccctcacgaccgccagggcctggggtaccctgaccaactcctaactcccaggacctggctctggggccatctagcccaagttgtcctaagctacgaaaggcgatgaggcagcccagcttatgaagctctggctcatgcacagacacactttacccctccgtgccttaggactgtccccagcacctgcctgtcctttttgcaggagatcgttctgctaagtggtctccagctctgtgtctctaaactgacctcctgttggggcagggacagggtcttcttgtctactgccaactccccgtggctggcagagtccagtgatcacgtgagccggttactgccgcggcgccaggatgaggcagctgggaacatcccaagcagcagcttgaggagggagaagtttccttaggatggggtgtgggagggtctccgaccaagctccttgagaagcaaggcctcagcctcttcacacccgcaaggagggacggcaggcgtagactccagggcaggctgcgtgtccgggcagtcccagccctgttagcacatgccccagggccacacagcacagagaccccacacagggaggtctccctccctgctctccccctcaccctggcccctaaagtcctgctgtttatttggttggttctggaaggagcgccatggctgcgtagctttgctgtgcaccgtgcagggcggcggccagcacagcttggtgcccaggaactgctgacggaccgaaggaggagcgcctgagacagtgccagcgaataggcccctgcagcaaacattacgactgcgcttacacctacatctagttagatacggattctattactgaagtaactcaaactttccaaaatgcttaagtgaatttcacaggtgggtgtggaattgccaaacgccaggtgtacactgctggtttggattatctggtcattttgatctgtgaagtcaggtaatattcaggccctcccagagtttccattgtcctgttctatggtcaaggcggggctgcaaaccaaccacgccccctccccgcatccccggatgcctgtgggggctgcagagtgatcgaaatgtcaggtaattccacaaaaatccacatttggatttcgggcttctcttggaactgaccatctgtaactccggctcacgctgtcctgccggcacctggctggggctcagcgggagctgttctctcactccttcccaagccccgttgtccccctggacaaatgggtggaattctattaaggctgtgaacttaagagagctccggagctgagagaggtgccggccgtgccgctggtgcctttgagaagctcctggctgccgtccatccaggcctggcctcagacctggatccctgttcaccctgggagtggcccacctgtggagggaggtgctccccaccacagcccccagccctgcagcccctgcaccatctgtccccagggcagctgcctctgcagccaggtccaggcctggggagctggagggcaccaagcggaccgcaggtgaggggcccgcaggtcagcacaggtgggtcaggtcctagcccgcttgtcatacaggtcatatgggacttagcctactttcccttctgtttaatatctgcacccctgaatagtgcaaatgcccagagggagggatcggaggctgggagatccatgggggattcagggggcagcttgggggacaaccgttgcagccgtgccctgatgtcagacacaaggataccactaggccctcgcccaggcgtccagagagaaaagtcagctggcggcaaaggccttgttctcagggccacatgctgatattttaaccagttctagctcaccttggaaatgctgatgccagcaggacgacaccaggtacagggtgcaggtgggtgctggaccccccaggtggcaaatgaaagcgcctgcgggggactcggtcagagggagcctcacagaacgttctgggctaaatctggtcatcagactcggggctggcgtcttcccgacacgtgaatttggagggtgtgtgagtcaggattcctggctgaactggtttgcactggtttgaagtcaggcaggttggctggttgcccgtgtcacaggaaggtggacaggacataggtgccgctgtcaggaacaaagccccagcctctgcctgtgacgcccctctgagggggcatgggtctccctcccccggaggcccggacagcggccaggagcaactgagcttcctgccaacctggtgaccccaaaggtcggagggtgaactccctccagcttcagcagaaccagtgttgatcaactcatcccagttggcctggaactcagaaccgatgttgatcaactcatcccagtcggcctgggactttcctgatgttagcagggagggttctgagtcccaagaagcgctcagtccccagcatgccctgcgcgtcggtcacggagccccaggaggagcgtgcagcccgcagcctgggcctgggcacagccggctttatcagcagctccatcccagccccacagacaggggaagaaaaggttgggggctgggcagacaagaccatccagggccccggctggtcacccaggctgaaacggaacacatctgtttctctacactctaaacactttgcaccaaatgtgcgggattttcacaccaagcaactttccagttctcagtggacaccaacggggtgtcccacgattcagttcgactctcacactacctgcaggtagcgcagaccccgcaggctggggctccgtcccacaagctgcccctctgcaggcgaccgtcccaagtatcgggtgcccagggttcacacgcctccgtctgacttggctacaaagttgggggttgccacgactcctccccaggcttgataatttgctctaagtctcacaggactcagggaaaaactcatttacgttcactgattcactataaaagatgtaataaaggatacagatggacaaccagataacaaggtgcacagggcggggtccaggaaggacccaagtgcaggagtttctgtccaccccccacactcccatgcgttccccagtccagaagctcccggattctatctgttaaagggtttaatggaagccggcaggcatgaccaatggatcgttattcaatctcagcccttctcccctccctggaggccggtgggactgaaagttccaagcttctaattgatgtttggtcttcccggtgagcgtaccccatcctgaagctgtctaggggcccccaagagtcacctccttgaacaaaaaaacgctcctagcacccaggaaataccaagcgatttcggagctggtgtggggaaccagggcagaggccaaatgtatatttcttattctgttacctggtgcctggaggccctggccactttcgggttggccgaccttcgggaagtttcctggtcccgaacgtctcgggtcactgtggggtaacgaggctctcggaccctcgccatctgtcatcgtcatcgccgccgcaggctggccttccctgaagagctccagatcgcagacaccgtgccgtgcccgccacgcagatgcagtttccactcagccccacagtgcgggcttcctgggcccgtgtccggctggaggagcaccccgggtccgagccagccatcccctcaagagtcctgcgccctggaggacaccccaaatgccacccctgctgttacctcctgcaggtttcaggatactcttacgtcgttctctgtgttcatccgcattttctgtcatgaaagtgaatttcttttgtcataagaaactgtgtttctcagcctcaggctgcctcaccgggcttcaccatgggcgcggctgcccgccccctgcacactcactgtgcgtcctggagggacagtgcgtgttctcacccggggccacggcttcaccctgggcacggctgcccgccctctgcaccctcaccctgagtcctggagggacagtgcgtgttctcacccggggccacggcttcaccctgggcacggctgcccgccccctgcacactcactgtgcgtcctggagggacagtgcgtgttctcacccggggccacagcttcaccctgggcacggctgcccgccctctgcaccctcaccctgagtcctggagggacagtgcgtgttctcacccggggccacggcttcaccctgggcacggctgcccgccctctgcaccctcaccctgagtcctggagggacggtgcatgttcttacctggggccacgcagggcctctcagggaaggctgtggcaagacagacactcttctcaaggcaggtctgggtgcctggggactaccccctagggacccgagagacccgctgggtaggatccggccccctgtctgccgcgcggcctccgggagagagctggcctctccgcgtctgttttctgcctgtgaaggaggcgatggtgaagataccagctgtgggtttcaaggggaggtgacacctgcgctctggtggccatggtgtggacacggacccattgtctgtttcctttgcgggattccacgctgggctcctgttggcaagaggaaggtcctgaggaactgcggggggaggctcggcctcgcctgcccaggtggtgtgggtgcctgcgcctgggggagagcctggggttctctcgggacccgcctctcctcccaaggccatttccatgcactggacactgcaggccctgaggcatcaggtctcgctggctttgctggccgtccggagctctggcctaggtgcggagtcctgggggtcctggggaacccacctgaagccccccctcgtggcccctgtggcaacactgaccgggcctgacctgtcccctcgtgtcacactgaccgggcctgacctgtccccttgtgtcacactcatcttacactgtgctttatcttgttaccctgcaggcattcacctcaacccctcccgtcccctctgggatgagccgggccacagataaaggcctcttagcggagctacgaaaaggatcactttagcccttctgggaaggagggatttaggttaagtcagctcagcttagattccaaaagactaggacggtcagcccaggacccaggcatttgggtgacacaagtgctttccggccgggagagccacaggctgtgcagggaaaactcagttgcttttgctttctgaagttcagggcttccagctggacgtttttggaagtgcgggaaacacatgaggtttcgctaaaggaatgaagcctgagcctccacggggatgagaatgacccaagaacctcccgaaatcccacctgcaggaggcgacagcgggggcgacagcgggggtcccgggaggcgacagcggggggcggcagcgggggtcccgggaggcgacagcgggggcggcagcgggggtcccgggaggcgacagcgggggtgacaacgggggtcccgggaggcgacagcggcggtgacaacgggggtcccgggaggcgacagcgggggcggcaacgggggtcccgggaggcgacagcggcggtgacaacgggggtcccgggaggcgacagcggcggtgacaacgggggtcccgggaggcgacagcgggggcggcaacgggggtcccgggaggcgacagcgggggtgacaacgggggtcccgggaggcgacagcggcggtgacaacgggggtcccgggaggcgacagcgggggcggcaacgggggtcccgggaggcgacagcgggggtgacaacgggggtcccgggaggcgacagcggcggtgacaacgggggtcccgggaggcgacagcgggggcgacagcgggggtcccgggaggcgacagcgggggcggcagcgggggtcccgggaggcgacagcggggggcgacaatgggggtcccgggaggcgacagcggggggcgacaatgggggtcccgggaggcgacagcggggggcgacaacgggggtcccgggaggcgacagcgggggcgacaatgggggtcccgggaggcgacagcggggggcggcagcgggggtcccgggaggcgacagcgggggcgacaatgggggtgtcctcccagggtgggatccgtgggggttgcaggttggaactcgggtgctccccccatggcacgcgggcccagtaagcccagccgtgggggctgccgtggtggaaatcgcatctgcatgtgaggacagcaggacccagcaccttcccgcggtgaccccaagaggcagggctggcggccgccctgccagagtccccctccggacctagaggaggcatctccctaatttcacctttttcagtagaaaaacatccccgaggttcacctaaaaccccaatttttcaggaaatggttgaggctgcttatcatttgtggaaatcacgtgtgcacaagtagagagaatgcagcggggtggggacaaaatgaaacccagagaacttggcaggtccgcacacaggcctgacccctgtgctcctaggggtgcccgggatgggtgccgtcgtcagccccatgacgagggtgactgggtcaggtgtcaacccccacgggcagggctctgtgcccaccaccccatgctgtcggagcagcccgaaggtggccagcgctgaacatggggtcccaccccatcctctctgagagccgggctgggccgggtgggggctggcagggtctggctgttctcaaacaggtcctttctcagaaggtgctagaaactgtgtccctcaccaaaagctaacatgggtgccagagctgggacaagggccagtccttccccaacctgctgggtctcccacacgcttccacatgctcccacacacttccacatgctcccacacgctcccacatgcgcacacacgctcccacacgctcatacatgctcccacatgcacacacatgctcccacatgctcatacatgctcccacatgcttccacatgctcccacacgctcatacacgctcacatatgcctgtcatgcccctttgtccagcggcttctcatccctcttccaagccagggaaggagggtcaggggctgtagttgcccctgtagttgtcaggctgtgggcacagaacctgccaggaggggtctaccctgaagtggacggggcccatgtggtgggagccgcaggatgtgagaggcagacacccagtgccgaggtgagccacgtgggatgcctcccgtgaggacgctccagccctgatccttccgggtccccactgctgcatgacagcctttgctggtgcacaagctcacagcccccgtgtgtgcagggctgggagggagcgtgctgggcccaaaggtggccgggacagtctgcctcagggctgtggtcaggggcacgggctgggactgccccactgcggaggcttctggcggacggggcgcggggagtggacgggacagggacggctccccccagcccagccggtcagcgcgggcctgacctccactttgagcggcggcttggcctctggcctctcagggtccctgctgagctgtgctgatgactcctcattcgcagggggggaggctgtggggccttgggggcctgagacacctagaaagggtcaggaggggaccacggggtgggcagggctgggaggtggcccagcaagcagcctggggacattcagatgctggtcactcagggagctggcagccgctctgcctgcccctcactggacttgaaagcagtgagaacagacgatgcccaaagacgcccacaaaagcgcttcctgttgacatcaacacactcttaggcctttctcctccgcgccctccaaggccggcatcgcccaggcgaccactggaccacgaaaaataaagtcatgccccccagcccccactctgccactcattattttcctgttgccttgtagtggactcagctatggtttgttttttgaaattgagtttgaaatccagatcctgccccacaggcactggcgccagagtcgcggctgctgaccagagctctgcagagtttttgctggaaattagagtcaaaatggaaccactgtgggccaaatcccatgcagggctctacacacatgcacacatgctcagaggcatgcacacatacacatgagcacacacacacaatgcacactcgagcgcacacacgtgcacacaggcatgcacacatacacatgagcacgcacacgctcacaatgcacactcgagcacacgcacacgtgcacacaggcatgcacacatacacatgagcgcacacacacaatgcacactcgagcacgcatgcacatacacacgtgcacacacgacgcccagggagtctcagggagcctgtaccagcccttggacagggccaggaagtcaaaggggaaatccctcttttcttttttctctcagaaaccccgaacaacagactttgtcaataagcatattcacttttgtacttaaaaagtatgtttttaaacattttaattagctctctagactcaaataatcatcttcttcaccttgttttctctgtgacacgcaaaaggctggcaggcaggaggcttctcagagtcaggagggctgggggggaaggtgctgtccaccaacatgttctggacaggacgcagacaccaggcgccccacggcccttcatgctccggagggtagaacagagccagagggtggtgaggaaggggcagatcctggtggctgcagccactgctgtgaggggacggggacagggctgctgaggtcgaggcagggagtggggaggccggaatgggaggcccatgctccaaagtacataggaagctggagcttccctcccactgagctgggccatgaacctgcccacgactctgtggggttggcaccatgaagtcgctctcagatggggagctggagggttgatcgccaccaagtcacgcagtttagcagtgggcactcctcgagccaacctgcaccacctcactaagcccagcatgggctcccagtgcccctcggcccacctccctatcagccacgccctgggcctggccccctgagaggccccatgaggctgcagttgttttctgggtaaactgtgtccccccccatcattcataacaatctctctctctgtctccttccctctcttcttccctccatctttcctccctcccttcctccttccttttttcttttttttcctttttaaataatttgttttctcatcataatagcaatacctagtcattgtagaaaaattggggacgattaaaattccaccgtggagtcgaggggagacttcccctggctcctgtcactgttgccacactgcatataaagatctgtggttttgtttcttcagttcacgtgacctcatcgctttactctctcactggagtcccttgtgagcctggtgacagcagcctcatgaccccaagctcttccacgtggggtcaggctgcccccagcctcctgccctgactcctgctgggttgggtctccttgcacccccacacagtgcacagtgccagctgctccttttcctcacccttgcttgaacagttgtgcacgcatgtaggtcacctcttccaggcagccctacaggagtgcaccccaccaacactgacaaccccccagacagtgcttaaagactgaaactgccagctaggatttggggaggggtccctgcctctgtgggtcctgtctggctctggcccaggctgacaaggaggagcatctatgcggggagctggtgcggtgcggggcatggtggggtgtgggggctggagggtgtggggcgggggcggagggggctcagtcatctttcatgagcctgaactgaggcccaggacgcacagtccaccatcctgggtctggacagcgggtccctctgggccgtctcacttccgcaagcttcagcggaggcacagctctggcattggggctgcagggacctcctggcaccactgggagtagagtggagccccggcacaggcctggccacctctccaggagaaggcacatgggtcctcaggtccctgttgggacagctggcgccaaggctgggcccgcacgttgcagcaggcagggttggggtagggtgctcagcacctgccgtgtggacgggagggacccctccactcccgaggagaaagcccaccagctggcctcgctcctgcctgcctggaggggcttctggagggagtgtttcctccgccgagtccaggcaggcatggctggaggaagagcgtgaagccagcatccctgggtgaccctgtgcactccagcttggctggatttggggaggcacacccaggccctgccccacccccgccttcacttgctcgggccccaccccgctgggcccctatctactcgacactgtgggggtccagttctctctccaagatcggccaagtccacgtgacctggcccccggacgctccctgcacgcccagccccaccgacacccttccccaaaccctggagcctggggacgcagtggggtgtcttggcacacaggtgactcgggagacagatcccctgaccctgcctgccagtgtgcctgcccactgtccgctgagctgggtgtcgcctgcttctcctcgttctgggtgggaccgtctgtccaaatggctgtcaaggccttcttcactatctcagcgtgggcagaaagggacggacatgtgagacagctgccctgtgcctccagcgcccccgcatcccacgcacgctccacagccagagctctcagcccctccagctgggggcagctctgggctacccggcctcttttcaggggcaggacagccgggctaattacctgcatgggagggccccactggacaggctcctggtgagggtgtctaccgccacccccgcctgcctgggctgagtcatccaggcgcagcgtcgatgtggggagggcctgtccctggggctgtccgtggagactcgccctgtggactggaggaggaggcagaaccccgcccggcggggcaggtcctggtggtgactgcgccgaccacggtcccgcccttccccacgcgctgggcagctgcccagcccggtccaggttaggtgccccagcatctggacgtccaccctccccgggacacccagcccagtggggtatgggaggagagagctctgtctgccctcagcttcctgcagtgtggctactccagcccatctgaccctgggcggtccccggttcccggcttaacagatgttgacaaggccttgcctccttcggggtggtgccaggggcagaggggcacagcaagaacagggcacagcccctcgcacacccccacgtgcctccgctgtcggcaggccccactggggtctgggagatgccttcctgtagcatgaaaccaaaggccacagaagcagagaaaaaaagctcttcgtttcgattataaacttgcaagaaaaaaggagcccaaactgttcagtgagacacgccgaccgatctgagcccacgaggagccccaggcagcagagccccctctttctgtttattctagagggtggccaaggtggccctgggagaggtgccttccagaattcagatgccagtggggcgggctgccaggagggccacggagcggggctctggtctctgatgccaaccagtgaaccctgggagggaccaccctgtgccctgcccagcctgtcagagggggcccagcccggtgatgagcagtcaagtgtggggcccacggggaacaaggcggcgtgcatttactctatggaggggcaccgtctccacacggcaagctgggtgtgccgacggcgctggatggcaccatacgttgtccccgttgaggggtgactcctgctcccatgattagggccaaagggtcacaacctctgcagctcccacgtggctcaggggaaatgccaaaacagaggaacagccctcggccgcagccgggggatgcgtgggtgccctgcacactggccttcaacgtttgtgagtttcaggccttcggtagttggcatatgggacactccctctccccgcaggccgtggggataccggctccttccgaggcgtttctgccgtgagcgtcctccagaacgagtgggctgaggccctcggctgacgtcctgggtgaccgcagacctgctgtgtgtggccggccggccggaccttagcacgtcatcactgggctcacggtcctgcccctgagcacatctgaccggccgtggtcagggtccacgcagacgtccacctctgtgtacaaatccaccgtgtactgtagatggcccctcctgacaccaccccgcggaggccgaggaccctccttccctgtggggtctgagtgcccgagatggcagagtcactacagctcaccagccctggggccatggtcggttcatggccgggcggagggtgagatgctgccatgaacagctgctacaaacaactgctaggacggtgtggggccagcgtgccacacagaactgtctctcactgccgagctggcggctggtggcctctctccacctggccaacctgggggcaagcaccacccaaggtcacatagccggccagcatcggcctggacttgtatctgactcaaggaaactccctactcccacttttctctgacgcacagagagcagcacatggcagcaaattaggttaaggagggggttagggaagaatgacacactgaaggtcatcaggtggaggctggctggcatccgtggctgtttcgtgtagtaattacacgttgctcattgaagttgagttacaagcacaggctctccatgtatcattcaaccacaattacgataattacgagaaggttggcgaaaatggcctgggagggaaacgggtggcaaatgacttgggaggtggtggttgggcggggccgtgggatgaactgtgctcacgtgaacgacagactgcgacgttcttcagtatttttcaaatgctgaaagagaaaatttcatggacgcgcttggggaaaccgtgtgatgtttttctggaggaatccagctactctgggaggagctgtttctttagtgagtggattcaggtgactggtcatcttgggcagcacattggccgtcaacacacatttgaaaacctcaagactgggccaaaaataaaagcagtaaagtccaccgggttgtgccagtggctcagagaactcgcagctgtggggagcacggcgggaggggttccccccacccagccccatgagggccccaaggcctgatgacagcccggtggtgccttgaacaggtgagaatcagcccccacctggggacgtggcgttgaatcctgacatcgtaaaccctacgacgccctgggaatcaagaacagatccactttgcaggtaactgaggctcagaaacagactccaaccccaccatgtctgtgacccagagctgggggctgacgtccgagccaggtccgtccaccaccccacagggcctgtaggcacccggcataggaaaggccgagaaaggggtccagtcccacagccctccaccccagcaaattcccaggtgctgggtccctgcaatgcacgcgataaaaactcccgggtcaaatacacagaggtgaccctgccgaggtcactcgatcctaacagtgggtcgtggtcctcggacatgggaggccacgtcctgctttctgaggcctcagaccctggtgaggcacagaaggactgtccagggtgcacccagaatttttttcacggacgtctgcccaggaggcttctgagagctgtttctcgagggaatggatagatgaggaaagagagagggttgatgtagacctacggttgggccacaggcccccctggcccaggtcccttagctgccatctcccaggatgcagaagcatcactgcagggcccgccggtagagggaatgggcaggcgtgatcctggtgggttctggagctctccgattccacggctcagcctcaacgttccgactcaggtaggaagtatcagagcttcacgcaaagctgcgaagaccagctccttcccacgagtgggtgggtgggatgatgctgtggccccttcctgggtctaaccccgtgacatgctcactgggaagcagtcccttcccagacatccagggacaaacacacccaaggccctttccttgcagaccctcccagaggaccagggggagggccacacaccatgaccagctgggatccttttggttcataatcggcctctcggggtctggtggtacaaggggcagtgtaccagtggctgggaacacccccagacagccttgaccacctcagcctgcatcctctaggagcctgatacctcctgacaccaggaaccccgtctacaggggacgtctcacctgtaggtggcctcgctgggccaggacaggggtcagcagaggtgcccaggagcacccaatgtctctggggcatgaacctcctcaagggaacagcttggggaaccacagccccagggtggaaagggccaggctcctttcccaagacagattagcttcttccgagaatactggccagcaagcattcttactctagttttgttttgttttaattagcagacttaatgttttaggtttacagaaacaccaagcagatggtagaggtcccccacacaccctctccctgacccagtttctcttatgattaccttctctcattagggtgtaggcgtgtgacagtcaaagaaccaatattgatccgttattattacaaatgtctcaagcctccatcaggattcactcttgtgctgtattttctacgggttttgaaaagtacacgtgggtcccatactcaccatcgtacgatcccagtcttaggacagcccgctgggcacaggaggctgggcatcctgccaggtggcagatctctgccccagcctaggctggaaccagctgcctgctgaccagaggcggcctctccccttcggtctagcagccaccaggggctctgagaccctgagcaggtcacggcaggtcctgagttccccatgtccgcatctataactcaagagatcccagcactgccctgcctcttccgtggtgtgatgatctggaccctgataggccatgtggcccttcaagggtggaccgggcctgggggggctgctatcttatgcttggtgggcatggaaagcagttgctgcgcacaggtgtgaagccgcaggtccctttccacagcaggtccctttccacagcaggtccctttccactgggcaccctggtacctgcagtgatgggggtggggggaggtgcactcctagagcagacgggggtgggtggggcagtctccaagctccgaaatgcacctccaccagaccttgagcctcagggtgatgtcacttgatgtgctgggcaaggtcctggctccaggctttcgatggggtgggtgctctgaacagatccttacaatgaaactaccttcagtggtcactgtcatcgccttccagttcttcagaccctcacccttgtcccagctttcctgggctgggggctgggctccacctgcctttgccggtgacttccgtccctgcagactcacaattttcaaagccctctccccgcctcctctggtagtcacaacccagttattcagacttgcacaggtcgttcgcaagtcctcctggaaggtatcttggctggaaaaggggacaaggccaagcttccccaccgctggatgctgcgctcggctctggaactgacaccaggcgtctcgggcagggccactgacccgcagcacacagaagccagctttgccatcgcagcggggaccgccgggcgggccagctccgccctctcctgcctggggggccctcggcaccctctggctccccttctctggcctgagtctctagggcctccccagtccgggcgggggtctccgctgtcccccccactgggtcaggcacgtggtggccgcggtgaccacctggggaaggcgccgactccgaggaacacactcgagcaggacgctccgcaggtgattctgccccgcgggcacggggtgggggcgggatttggccaaatctgcagagagtttaggttgtcaaagctggggcgggggttgctactgatacccagagtgcgggggccagggtgctgccaacatcccaccatgcgcaggacgtccccaccccaagaaccacccggccccgcgtatccggagcgaggagtgggcagcgctcggcagaggccccggcgcggcggctgcacgtcctccgggaggagggagggaagccgggctcaccgccgggcctcccccccggtcaggagggagccgggaactcccgaggcaccaactctgcggaacgcggggcgcccggatcgcccctgatcaccgcccgctggcgaggcgcgggggacccagaaccggcggggccgggagcctcctttaccgctccgcgccggggctgcccgcaggatggggcgcaggatggggcgcaggatgcggccccggcaccgcctcgcgggggtctgcggggggcgaccgcggctcgcgtcggccactacttgggggtctcgggtttccgccccgccctcgccttgcaacccctccggccccggactccgctttccaggccgggctcttccctccggaccccgctcgccgcccggcgcggccccctcctcctgcagcgccccccgccccggcgcccgcgcccccgattcgctgctgactcggtgtctgcgcgtccggccgggcgccccgggaggagtttccggcgcggggcggggtcgggggcggggtcgggggcggggcggggcggcgggtgggccccaccccccagctgagcccggccgggcggactcggactcgccaacttcagaggctcggcggcggcggcgggcgcggagctctgcgcgcggctccagcgggccgggatgggcgggcggccgcgcggaggacgcggggggcgcgcgacgtgaccacccggactcgaagcccgccccgcccccgcccggctcgccggctccggggtctgctccgggggtcgcggacgcggggccgggcggcggagccggcgccagagcatgcggggcgcggcgcgggcggcctgggggcgcgcggggcagccgtggccgcgaccccccgccccgggcccgcccccgccgccgctcccgctgctgctcctgctcctggccgggctgctgggcggcgcgggcgcgcagtactccagcgaccggtgcagctggaaggggaggtgagtgtgcgcggcgcgaccccggcccggccccctcccctcgcgtcccctcccgtcccgggccggccgagcgtgcgggggcgcggccgggggcgggcgcggggcaggggctccgggggccgctctccaggcccagtccggtgcccgctgtcccccgcccccggttctagaacaaaagagcccgcggcgtcccggttcccggcccggaggacgcccgggggaggcgcgcctgcagcgcggccgggtgggtcccggctccgcgcgtgtccgagcctcgggggccgccggtcccgcgaccccatcccgggggcaggcgggggtcggtcctcgggcccttcctggcaggctccgggagttgcgcgccccgaggccgccccgggccagagcgggaagggacggccgcgggagggagcggcggtttcggggatcgggcgcggaccgcagcgggggccacttccgtctcggggagccgcgggcgggcacctgtgagccgggccgagtgtggctccggccgggccccccgcccctgccccgtgaaggtcaggccgcccttggccgcggcgcgcgctgcgctgggcgaccccccccccccccacccgcggtggcggccgaggactttttttttttttttttttttttgactcaagcgtggccgccgagagcggcgccgaccgcgactgcccctcgggagccgccgccgctcccacgcgaagcccagggcgccgagggcaccgcggccgaacccgccctgcgcgagcctcgcagtcgccagttccggggttcgcagatgcgcggggacccgagtgacgcgcgcctcccggagagccgtggccgggctggcccgggcctgggtcccgcttcccctcggcgcggcccccgcccccgcccccgcccccgccgcgggccgagtcacgcggtgatgtcgagcgaagctgttttccgagaaggtcggggcagagccggtgcggggcgggtggtgtccgcggggcgggcgcaggtctccccgcagccgcagcctccgttccgggtccccgcgaagccacagtcgccccccagcgcccccggcggagcctccccgggggaaggggcgtggcgctggggggcagagtcgccccgagggccgtgggcggtgcccggctgtcccgggagcggccgcctcccttctcggccgagcggggccgcgggcggatggaggtctggggggggtcggccgggaacgccggcgccgggagcctccgaggccgacggctcttctggggccgcccctgcccccgcggagtgattcagccccggctcgctgcctctgcccggcgggtcggtgcatccccgaaccgaggcccggggcgttccgctccagcagaccgaagccagaaacgccgcccccgccacccaggccgagtgtgtcgagaaggggccggcgcccttttcagggtgtcaggggactgtgtgcccggtaggagggggcgcctcccggagcccgaagggagggcgcggtaggcagccgagggtggcggggaggccacccctccacctccaggggcgggcggctcctccaggcaggtgacagcagcgggacaggagtgctttgccctccaggacctgcgcaccctcctgtctacctggaggccctcttcgccatcgttgccagtcctggcctcagactccccagaggggacccccccacacacacacacaggggaccccccccaacacacacacacctgcagagcctggcagagggcagctgtgggggctgctggagctgcgggtgtgatctggaggggacacggggcccggctgtgtttctggggcgtaagtgagacttccttttgttgtggtcactgccccgttgatccacacacgtcacgaatcagtgacagagactcgctgtggaaaccggagtgcgctggcctgcctgctaccctccggtgtttgtgactttttaccagctgtcctgacgaagcacagggtggagcgagcgctggtgtgctgggtggattctcatcccccgatagctggaaagttgcccctcatgacactggccactgcatcgacggcctctgttgctgggtgtttcttctaagcagttaagtaggagatgatgaaacctcccttccgtggggggaggcgggaccagcgccccgtctttatcagccagtgctcataaatgtggaccatgaactttcccacttgctgtcagcccgggcatcgcaggtgcggtcacacctggttcgtctctcctgcaaggtggggaaaggaaagttaacctgccagtgggttcgaagcccttcctgactttcatacaggagccgggcattttgtcctggtgacccagagttgtggtgtgtgggctggtgcctcaacaaccctccagtgcacctgcgccccccttcagtgagtccctttatccacttgggatttgccctcctttccatgaaggtgccccacaagcatgtccacctgggtggtaacccttgctgacttttaaaagtgtatctgttcagtctgttgatccaacatcagatcagccttgtcagtttcctaaagttgaacgaaccacggttttgtctgcacgcttcagttttatcacagcagaactgtgtcacctgcatctcacgtgaaaatcacaaaatgccctcatccatgaccattaaagataggtcacatttttgcaatgccagcaattttgcataaacagactctgttttcaggtttgctgaggtgctggatatttggaggtgagagatttgaggcactcgattttctggtaggaaccagcacagaccatgagtctcggacttcgtgccgaggtctgctgggtcccaggctgaaggatgcatcgtttaactttttttgtctacacgggtcttgcgcatcatgtgctactgattttaatgtgaaaatccctacgtcagcgggtctggttggagtcccgttggtctggatgtttcgggagaatgtgagaggagaggggagcaggccctgtgctgggtgcagacccgtctgagtgcgctgagaagacgtcaggtgaaggccggggtagccgggtgtcttctttcttctgtgtccaccttcattttgtcctcttcctctttttgcccagtgtcttctgagtgggtggagccaggcgtgcccaccagatgcgggtagcatgtgctaggccaggacggcccccaggctcaagtcggcctcctcctgggcagaggtgggttggccgcctgtccccagctgagttgtggctgttcccctcgcctgctcagatgaaggcagtgctgtcagaggtgaccagagcccgctccctcgaccttcaggactccccgagagggaggcaacgtgtcaggacggtgtatgtggagagagggtcgaggctcggtgcctgagcacgggcaggaggacagtggcctcgatgccagagacgggagggagagacgtgacgatgaggctgcataagaagagagctgactgtagctgagtgtatcagccactcaccgagtccagtttccacacagcacgatcatcgtgcccttgcccacacacgtgttagatgagcttgtgtgagctttatgggctgtaatttgtgagtctgttctgggtgtgtgatcctggcagccggctaggcctggccactcgtgacctggggccttgtcggggtggggagagggtgaggaggggtgcaccctcgacaccaccctctgatgtggcctgcagcctatgaagagtgaggtttgggggcccagagtgtgagtcaccagcggtaaatgcaaaccatatgtgatgcattttctctgctgcagaaagggtttctggtgactcgctcaggccagggctctggaaacagcattgcttatttcacataaaaatcctaagaatgtgggtgaacctgtctgagatctgcgtaataaaacacttagttgaagtcaccgggttagttccaggcccacttggttatgacgtggctgttagccacgagctggcatttacgttaaagtgttgagaagcgtgagggttttgatgtttcagtttcttgaaaatataactgtttctactcaggacctgcctctccaagagtgtagcacacttcatttttttctgtttagcatgtatgagggtgaacttagcttgctactcacacactactcaccctgtggaggaagttcgcctcgcttttgtggtgagtcttgctgtaatgatagcttatatttacaaataccgtcggcagtgcagggtcttcaggcttgcagaaaacggtcaagtcattactttgagaaatgtacaaacatctatgcttaatgaggtgctaaaagacaaaactcatctacaacctccttccccccaaactgccaacactctggattaacttaaaagctgctctctgggcaggttgcatcccagggctcctccttcacacgtggtggggccccaccttcgctttacctctagcgtcccagccctcgtggtcatctggaaccagggttggtacacagggcctgctggcattcctgtgatactccgtgatattctggaggaatccatcccttccctggggctccatcccactgccccagcacctccagccaccctgattcagggacatcgcagagattggtgtttgacgctacggcagcagaggcgcagactcttgagtgttggagggtgtctggagggcctggggacaagcaccgcctgcactcccgggagctcggccccgccccaccatggctcttggtgcaggtgcactggaaggaactgggtggggcccttgtgccgaagggcggagatggcgccggcctgcctcacgggcaggggtccgtgtggcacctgtggccggcagcgggtgggtccaggagccgccatcatttggagcgggtatcgtcctcactgactctctgtgggtgcgggtggggtgtgtgacgggagctccgggcctggctgacagtgtctctcctctgcagcgggctgacgcacgaggcacacaggaaggaggtggagcaggtgtatctgcgctgtgcggcgggtgccgtggagtggatgtacccaacaggtgctctcatcgttaacctgcggcccaacaccttctcgcctgcccggcacctgaccgtgtgcatcaggtccttcacggactcctcgggggccaatatttatttggaaaaaactggagaactgagactgctggtaccagacggggacggcaggcccggccgggtgcagtgttttggcctggagcagggcggcctgttcgtggaggccacgccgcagcaggatatcggccggaggaccacaggcttccagtacgagctggttaggaggcacagggcgtcggacctgcacgagctgtctggtgagtgtcctgcctggggcgggggcggcgggcctcgtcatcacggggctggtgatgtggcaggtgtctctgatttcttcctgtcccctcgtctgctcagccttggtgaaaacccttctgtgtctgtgcttcggacatgactgttttgcctgaagagccccccaggtggctggggttgggggacactggcgcccgcagaggggccctcctagggggtgtgacatggtgtaggggggtgtgggatgtctaaactaaaccatcttggaaatgcagcctttccaactaaaaccacctttgaaaagactggcccatctgggttagtgtttcgggcggcatggccttggccgagcggggcctctctccctggaggtgtgtctggggagcatggtgagcatccccctgtggcggccgggccagtgctgggtcggacgcgcccccatgcttgtggatcgtgtagcacctttgaaacgggtgcttttgccattcaaactgccctgggaattggctgggtgtctgtggtgtcggctaaagaccctgaaacgtccatttttgggtgggagctgaggctggctcagccctgagcggtgctgagctgtgacgcccagaacatggggccacccccgtcccagaggggtcttgtgggtacgataaacagacagcttccctgtgtggccggcagggagtggaggtgtcacgtggcgtctctggacgcctgtgcttgggggagaggtccttcgtggagggctgtgttggtctctagaaaattctgtgggtagacaccaggaggcatgaggtcctgggaggcacctgtgggccgtgtgacctccatggtctgtgtggcctcggactcgggtgtacagacttctatcctgaatgggaatccacatttttgtgttctatgttcttggcctagattacttttcatctctctctgaaatctctcccaggtagactggtcatttacagagtgagtgtaggaccgtctgcctggagtcctgactgccccgagtcccagctggcccatgagctcagactgccccttgggcctcagcacccgcagggctggacgctgatgtaaactcagctgtgctgtggttggttgcacgctggataaaactttaaccacggcggcctttatcttggtcaccaacagttatggtgggtgggagacctgggggagggggtaccagccttgctctgggggccctggagaaaaactcacaatgaggcgaaacctggagaaatccaagctccaagttcagtctttctaaccggaggtagaaggtgccgggccagatgttaggaacttgcaaacattctttctgctgattaaagtggtgattggtcttgaagacgttgggctgcgggtcacatgctctgtggcctgagctttgttctgcttctgggtgagattcttagagaggctgtggtgtagtccgtccctgccacgcacacctggacgtccacactggcacaggcccgatttctacatttccaggggaaattcaatggttctagttgtcagctggggcgacccttacggagcctgtgccctcacctttgggaacagagactttgtctctcctgcctctgggggtggggtccgaggcctacaggccctgtgtaggctggggcggtgggtgggtttgggagaggcatgggatggtaggggctgagctgccttggggtcctgtggggttgcagggaggcagcggcctcttgtgaggagtgacttgagccccaagggaccagagcaggcattcggcggtgggtcctcgctcaccctccgtgtgcctcctgggcctgtggggtcctgcgcaggtctgtggccccagtacacgtcaggctggcttggggtcccagaactttgctgtgtcctgtgaggcaggtgcttgggtttccttgtttacacttggtgaccctgcggcatctgcttaaaccgagcctgaggtgatttccagtgccctgtgggtggtgggttgcttatccgaggaagcagacatgcagggatcctcggaactgacaggggcccagactctgaggttcaccgggggcccccggagctgggacccacgcctggcatctcacgggaacgggcacagatgcaggcccctccctgggctgagcacctccagggccctcacgagaggcctctcctatcctgatggggtggaggggcaggagggatccgaggaggctgatacctctcctctccccagggtattcgcctttcatcaggggacgggggcccctaagcctttaatgctgcaggaatgggtacataatgtggaatgtcggtgccggccgtctggcagcagtgacgccatcccctgggccaggccggctccccagcactctccggccagcgccgcggtttcccttgcctcccgttcctgcacttgctgtagctgcgagagccgacggaggctgagccgggcagcgccagccccgccgagcctgaggtgagcctgagcctttggcctggcagcacgacccacgggaggtggacgagctcgtctgtgtgtcagaagttccagtttgtgctgactcaggaggacagaggctccgtgggctggaaccccggacaggagagggtgtgtgagccccgtcccctgcccagccaggaggaaatcccccgctccggtgggtttcgttggtgtgatcgtggtgcgttcatgctgcataatcggcttccttgagtaaactgagacacgccgatgaccaagagttggccggaacacgggggcaggctgctcctccaggggtacacactgggggccaggcgggaggggacccggccccaggaccttgggatttggctgactacgggcaggacctctcagccctgcaccagccgcctctgcaggcgacacggacgccttccttggatgctgaggaaaccccgcaggatgggggtggcagagagtggtcaggtgcagcttccggccgtgcccagacctgtgcccagcagacctggctgaggccgtgtggggctgctgtttgcaggccagggaatccgggaaacgggcaccgttcagtggcttggggaatgtgggtgggggctgtctggttctggggtacacagacccgagacagtccaggcaggtcccaggattccagtctgttcttcagcttctcccagggctgtgtgtcagatgctcctggcttggccacatctgtgcttggggtttggggtgcaggctctgtgtaaggccccccaatgcaggccccagtgagcaggtgcccagggccgggcagcagcatcgtggacacaggcagtgggaggggaggggatgctgccttgatgctgatcatgagcacgtggtgccgtccctggctctccaggacgccggagtcctgcagcgtctcaggggcctcaacgcctcccccctttaaaatcctgcccctggctgagcccgtaggtgaatgaccagctcggcgggcgcagagcccctgccgatgagccccctccaggagcctcagagtttggagaagtccttgatgggtgggagggatgggtggaaaagtgtggaagataattctcattatttcctggaagtagaggagaggggctgatttttccaaggcgtcccatctctcgtccatctttggcttcctgcttggtgccttctctccggccactgtaattttcattttaaccatctctgggcttgtggagaggaagggtgtggcccccgccagcttcctcaccaggaagagggagggagaaagggaggcagggggaagggcaggggctatggggccaacacccccggggcaccccagcaatggactgcagcctggagtgcggccgcagcgcgacggtgatgatggtggccttgaggggagccttgggagctcagccttgggtcctcgagcccactggagcccaccctccacccctacccactgctccctgttcttggctcctctgaaagcaccttatccccgtcaccggctcctctaaaagcagcgtgtccccccgctaccccgtcaccacctgtgtgggagacccagtaatcgtggccacagaggtttcccgtcggaactgtgtgagtccctctggctgtccttacctgggcagtcctgccggaccggtcggtgtctgtcattctcagcctctcctcggaaccagccggtcctgcctctctacttaacacctgccgtgcaatctaagtccccgcagcagcgtccccaaccccaccctgccggtccctcccaccctgttcatgctagctcctgagagacctgcctgagatgtccacaccccagccctccccctccgaggaggatggaccaggattccaaccctttgccgaccctccccaccgccctggagacgaggtgcaatgtgtccgtgagcagcgcgttccgcagcctttatgagcctggctcctgttaataattgtctcccgattgtctcccggcgtccaccggcgtccaccctgcattctccgtgaaggtgacttctgctttgtaaagctcagaatcagaacagggaggtctccagggtgctccttacgagctcagctgtcgttgggtcgtctccagaggcttctagcaggcgaggctgcaggcactgaccgtccccggccccacacccctgccgtcagccgggtgagccagggcggggtacccagggcacgtgagggcagcgtctccatcctccccctcggccgtccgctgaggtcgtggggccgtgactcacagagggcgaagtgctagggcttgcataccctcacgcgcccaggccccggggtgggacgcatgtggctgggcctgtgggctcccctgccccagggtgggagccacacacccccgccccgccccagggtgggagccacacacccctgccccgccccagggtgggagccacacacccccgccccgccccagggtgggagccacacacacccccgccctgccccagggtgggagccacacacacccccgccctgccccagggtgggagccacacacacccccgccctgccccagggtgggagccacacacacaccccccaccccccgccccagggtgggagccacacacacacacacccccccacacacacaccccccgccccacacacacaccccccgccccacacacacacaccccccgccccacacacacaccccccgccccacacacacacacacccccgccccacacacacacacccccgccccacacacacccccgactgtgctgctgactgtgaggatggacttccggcacctcctgcctcctgcctttgcaggaccgcctggcccagccccagctgccatggctgcccagccggagggtgctgctcagtgaggggaccctcgggtggactggggtcaccacgcttctgtcgttgaccagctctctctcagccgaggccacctccactcacatgaggcgccctgggctgggacctctggccctgtggtacggggcaggtgctggcgtgcagtctcacctgtggaggataaaagtgctgcctgaaatttgagatcccccagtgctccctccttgttgcttccggacgtgagtggtggtctgtgctgctggcctctgtccagcacgtgcctgcatcaggcccagcatggtctgcagacccccagccggcgagtgggatgggggtccacataggtgaactaagtgtcaagggtgggccacaccccggggcccccataggagagcgcaccgggcggcttccagcttgggggtcaggaggcccccgtggtgggggctgcagtgtgagtctgtacacatcagcaggaaggggatttggccagaagctcccattctggagggttgctgggatggcagaggtgcccccccagtgccaggctggaccggcctcaaggtgctcagcagtgccaggctggaccggcctcgaggcgcccccagtgccaggctggaccgggcctcgaggcgctcagcaggctgtgcagtttctttttcctgataccttaatggaagcaaatgcaggaggaggtgggtgggccggtgagtcaggcactgagcccggctgggaggcgccctcacccctgcctggcggaaagtgctggccttgtctctgggtccctcctacctccaccctgcggggtccacaaagacctgcgcttgcccagtgcaccgtagactccagggtctccgttgaccacatgtgcaggccctgagggtccatgtaagttcctgaccccagaaggcctctgagcagctgtccccgccttggccaaggtgccagatatgtgtgctgccctgtcccctgggacccccagtcaccagcagctggctcgggcctgtactcatcaggcaggtgacagctcagctcacttcagcccagcaagggcagccggccaggggtgcagacggcgttagcttcttccagggccggcgaaccccaagtcaaggtcgtcccagctcttggccagggacgtttcagagccttcagaacgtgaaatggcaccggcgaaaccagtgccattgagatttcacgtctcaaagtttctattgcgttaggagacttggggccaaaacctagaggctcagaacaggtgaggccttgaaacctgcaataagagcaaataataaaaccatgttttccaagtccgtcccgagtgtaggaatgcggggcgtgcagaggtttctgtttcacagtggcccgcccatctaagaaactggggcgaagggcagggcgagggctgggccgaggggagaaggttgttgggaaagcctggtttggccggtacgggagctcattctgagaagcctccgtgctttccgcattctctgggggaggccaggccccgcagggttcaggggcttcagagggggttctgtgagcagggcttggcttgaaagccatttggggcatgcacctcatcccgcggccaggtggcatccggggaaggggccgggccgatggccctgactggaactcactgccctgctgggtgaggccccacgccggtggcaggtggacgcgtcgctgcctgcttagggatccccttcctggaatcttggcctcgctggcccttccagccacatggggggtcccgcgggatgggatcctccttttgggtgccgctgccgtcgcgacccagggaagtgggcagcagagctgtggggagtgtctgcccttcgaggaagctgggaaatgagggtggtcccggcgccgtgggccgtggaggtgggttgggggcgactctgggaggtgggggtgctcctggcgccgtgggctgtggaggtgggttgggggcgactctgggaggtgggggtgctcccggcgccgtgggctgtggaggtgggttgggggcgactctgggaggtgggggtgctcccggcgccgtgggctgtggaggtgggttgggggtgactcttgtctggtgggttcggttcagccccagtgggctttgcatttgcaacaggcacgtgagcgatttctcagtgagtccggctcagccgcactgaggagataagtggggaaagagcacaaagacccctccccacgaaggccctgggacatggccggactgagggtcttgctctcggacatgtgcccatcatggccgaggtgcaggtgcctttggtccaggtggggccgaggggtcccctgggtgagaccccgtcgtggtcgaggttgtgttttctgtctcccgtgctgccggcccctccagcacgtgccgccaactcacatttgaagtggcgttggtcacaaaggtgccttgacgtggacaccctccctgacttggctttgctgagtgtgaggatcctttgacggtggtgggcggcgttccagagcctgtcccgtccaggctgcttcctgactctgcctttcttctccagcgccgtgccgtccctgcagtgacaccgaggtgctcctagccgtctgcaccagcgacttcggtgagtgtctcctcggcagcttctacctcctgtgctcctggtttctgccacatggagctgtttgggcccaggagtccctcttcagggcccaggacagccttccggtgctgcgtggaccctcctggaggggcacacgctgtggaagccctgggctcggccctccaccagccctggggacagggacgccaccgcccacacttggagggagctgggggttgttttggtgactgtcaaacattttcccattttgtaaatgagatcactgctcttcgaggggactcttgaagtccactgtctcccagcagctcttcttgctgaagtgctttgtaaacagcattttatcagcagcccagagcatccttggcgttggacactccttgccccccaccagagttcacgctgttccaggcctgaggcccccggcggctctgcggctctgcaggaggagctttggggtcccagggctccagcccctttgcttgtggcgtttgcacagacgccctgtgggaaaggtttggcctcccgtcgtgtggtgccgtggaagccatgtcctgcaggccccggctctgcaccccacctccaagctcaaggacaggccccttctcactgctttcccggcccctggcatggagttggggctgggcaggggtctccaagtgtggcgcgaaggctgtccccatgcccaccctctcctgtgagctgcaccgggtctgtctgatcaggacacagaactgcaggggcaccctgtgtatcagctggacttgtttgttctgttttcccatttaacaggtctggcccttggtagaaagggcacctgttctctgacgatgtctaagtatctgggacaccccttggcagctttctgctgttacattgtacttttctctgggaatttccacgctagatggcagagtcgggggtcagctgcccgttccagtgcccatcgatgcgggggcagggggaggtgcggtggtcttgctgtgtgcttgcctttgctcactccctgtccccatctccttccccgcacagccgttcgaggctccatccagcaagttacccacgagcctgagcggcaggactcagccatccacctgcgcgtgagcagactctatcggcagaaaagcagggtcttcgagccggtgcccgagggtgacggccactggcaggggcgcgtcaggacgctgctggagtgtggcgtgcggccggggcatggcgacttcctcttcactggccacatgcacttcggggaggcgcggctcggctgtgccccacgcttcaaggacttccagaggatgtacagggatgcccaggagagggggctgaacccttgtgaggttggcacggactgactccgtgggccgctgcccttcctctcctgatgagtcacaggctgcggtgggcgctgcggtcctggtggggccgtgcggtgagggccgcgcgctgggagccgcatgccctgggcccaggcctgaccctggtaccgaagctgtggacgttctcgccacactcaaccccatgagcttccagccaaggatgccctggccgattggaaatgctgtaaaatgcaaactaagttattatatttttttttggtaaaaaagaaatgtccataggaaacaaattcccgtgtcttaaaacgccttggtgtgccgtctgatactgttctctaaagacgttaggagtcacggcatctggcctgcggttgggtgaagcactggccgttgggcacagtggatgtgtgaaaaggtgccattcagagttgttattctcatgacggaagttttggagccaaataatacgttttttattttcattttatttttaaaggatgagctttggtccttttcaggccgccggttgtttccgttcccgagaataaagacgaggatccgaccagccagaagccggagtctgtctttcgccaggtccggtgcccacggcccgtgttcagggcctcgctggacgtaccccagggcgccaccctgcctcggcagacacgcttgctccgcccggcgactgtccctcagcgcctgctgctgcatttccattaatgcaggtcctgccctgtggccccagcctgcccacagtgcaggggcccacagctagtctctagacgcccaggagctggtctgaacccaggttggtgaccccatgtccccaaaggatgcggctaccagaacaaatcaccaccgactgcggggctgaaacaacctcgttctctgagttcctgaggccacaatccaaagtcacggtgtgggcagagcctctccctccagggctccaggggagaacgcttcatcttctcctcagcctccaggggttccagggaggacccttcgtcttctcctcagccgggggcgacccttcgtcttctcctcagccgggggcgacccttcgtcttctcctcagctgggggggacccttcgtcttctcctcagccagggggggacccttcatcttctcctcagcctccgggggttccagggaggaccctttgtcttctcctcagcctccgggggttcctgggaggatcttcatcttctcctcagccaggggaggaaccttcatcttctcagccagggggaggacccttcatcttctcctctgccaggggaggactcttcatcttctccttggcctctgggggctccaggtgctccttgatggtggctgcatcactccagtctctgcctccgtggccacacggcttctccctgtgtctgtgtccagatctttctctaggacattggtcactggattggggcccacaccagtgacctcgtcttaaaccgattacgtccgcaaagaccccatttccaaataaggtcacactcagcggttcctggtggacatgaaatttggggtacaccatgccccagcacagggggtccctgggagtgtcagttaaccagaccccagcctgcatccccattgatgaatcaggcagttcctcccgtgcagccgctaagagcaaaggggacctgggagagggtgatgtggtcagtgggcaccatgccggccttgccaaatgctcaggcactctgggtaagcactgtgtaccggctcagatgttcactggctcaggtgtgcaccggctcagatgttcaccggctcaggtgttcactggctcaggtgtgtactggctcaggtgtgcactggctcaggtgtgtaccgtgcactggctcaggtgtgcaccggctcaggtgtgtaccggctcaggtgtgcaccggctcagctgtgcaccggctcagctgttcactggctcaggtgtgtaccggctcaggtgtgcactggctcaggtgtgtaccgtgcactggctcaggcgttcactggctcaggtgtgtaccggctcaggtgtgcaccggctcagctgtgcaccggctcaggtgtgcaccggctcaggtgttcaccggctcaggtgtgcaccagctcaggtgtgtaccgtgcactggctcaggtgtgcaccagctcaggtgttcactggcttaggtgtgcaccggctcagatgtgtaccagctcaggtgtgcaccggctcaggtgtgtaccggctcagatgtgtgccggctcaggtgtgcactggctcaggtgtgcaccagctcagatctgagccagcacaggtctgcaggctcccacaggtcacaacaagaagcaggtgtttctgggcgaggacctgaagcagcaggctggggctgggccaggtcccactgtggctggtggtcagcacacctttgccagcaggcgccacagcacaggtgcccagcccacagcggggcggcagggaatctgctcctggaacctgggttttctgggctggctcccgggggtgttgactgacaggagaaggctgcagaacaagaaggtcgggtttcaggctggcagcctctcctcaattacagggatgctggggtaggccagaacccggtgtcaggtggagtagaagtcacgcttcacgggaggcttctgttttttaagaagtgcctgtgggctggggggtttttggtccagagtctaggggaaggcaaagcttaccaaacagaaagtgtccactccggggtgggggactggggcctcgtctctccgctgggccaggacagggctgtgaggtccagctgcctgctcagctctgggacctgtcctcctgcaggagcccacggccgtgaacatgcacacgggcagatccacatgtcccccgaggaaaaagagagggtcaaggttgagtgtgtgggtgctagggggtgcagaactcacttctaactatgagggttgaggcgggcttcacaggggaggtgggttttgagccaggcctgcagcccggcatctggaagtggcttccaggctctccctgagctctctcctgcaggacacccctgcctgcagatctgcacccccagctccttcctggggacttgatatcatgaccctgcctggcaccccaggggtgaatgctgcacccagccctgagggtttccatctgctgggggcatctgacctgggcaggccagggtgggtgggagggagtccagcgggggaggtgcagggtggccagggggagacactgccctggctggagcctggattcactaggtcatcaccaatgcagggggtcctggctcactggactttgctactagagaaggttggggagctccacatgaaggcaagaaggctggggctcagggtgtaactcatccccggagagcaaccagaaaggccgtcggattgcaacgcagcctgcattgtcctcgctgaacgcctggtcctgtcccacctgcaccggacagcaactgcttcccctccagggcggcccccatcgtcccccaggtgctgcaagagcagtgagacttacccaagacaagtcagaggctttggagctctcgggggcggtggcttctcccaggagccccgtatctgtcagtccccccataaggggaggggagttggcaaggctcctccttgctcccagcgtgaggattgcccctacttttccggcccccacttgccccctccacctgcccttttccctccgggaagccctggaggttttccaagaactctgcgggtcgagggggcagcctatgtggggtggcggggggcctcctgcttgttggatgcccagacgcctacacctttcaccctggggtccagtcggctgatggccatgagagagaagctgagagcaaccagagcccacagctccatgctggtcccccatctgcaaacgctgggccccatgggagctgtgactcggtttccagctcgtcacagggctggccgaggccccggcatgtcaagccatctcaggttgggcaggaatgtggtccgtgttcacatgtgtctctgtgtgtgtgagagagaggggtcagctgggacgctggggtggcagggacagtcctggctcacccctcatcctccctcgacctcgactccctccacatgaggagcccccccttcctggctatcctgtgagttgagcttcctctgctgggagggctttgtcagaggttccctgcggttccagaaggaaagctggctgcagggagggccgggcactggacaccgtgtggctgagcctgtggcgggggctgcacagctgggttcccagcccccctccttgtccccaccccaccgcactgggaggccctgctgaggggccagagtccggctgcaggtcccacgggtgggggtggggcccctcattagcactgcagctgacactgagggcttccacctcgctaattgattaaactgtttagaaaccaggccggcgtggtgggaattggccccggccgggctgtccgctccccttctgtgcaggcagcggcccccggagttcatcagtcaggccggttggtggggtcccggccctggctgccctcgggaacccttctttgctcctttgtgcggtcaaaatggtgagggtcctgagaggagctggtgagaccccggggtcctctcctccctgaccactcactgggcgagcatggagggaggcctactgtgcacgggcatgttcctgggaacctgcctgctgggattaaacccgcccttgtgaaggacggcaggtgggtcactcaataccaggaggggcacggggctgtgagcagaggcccgagagccttctgaggcggcaccgggtgctcctgggccctgctctcctgggatttgttgtgcctgtgacctcagcctcttccttcctctcctgtgggattcccccaacaccccctcccctcctgccattccttcccccaccaggccccatgcctcccctccccagtgccccctacccccaggtcttccctctaggacatcagcctgggctgtgggtcttggtctcccacagagactgagtcctgggagaagggcagagccttggttcccagtgcagcccctgtgccagcctgcagtgggcaccggttcagccggtgcacactgggtcctgcccccacctgaggagcggcctggggcctgatcagccctgctggtgtctggcctgcagccagcaccggctctgctattcacacttggttacaggtgggtgcccatcccagcagcctcggagcagagtgggtcgggctccggaggtgggggcggccactaacagcaggaggtcgtggcagtgcggctatggcaggggttctgaggggcggaaggcaggggcgggacgtggggacgcagacctgcagggaggacgccggctcacccagcagggaggggatggccgcccagggacccccagcctgcccgctctgcttccccgaccgccggggcaggggccccacgggggacgccagggaacgtgaggaatccggagtcaacactgggccactgtgtgctgccagccgggcgggccgtgatttataaagacagcggaggcttggctggtgtcggggcggtgaggtcacggcggccgggggctctggaatttcttcagaagaattttgcttaccaagccacatacttttctagccatcagtttgatcagaggcaagatgaaaaatatgctaaaaaacaaagaaacaaaaatacacccggggggctccggtgagggggaggggcgctgcgggaggggtggagggcccagggaagggtgaggggccgggagccactctgcccggcactctccgcccagaaacagcccaacgcccctttctttccccttttagcactgctgagctggactaaaatgcccaacaaggaactttactaaaaactgaggcaagaaagaaaacacacatgacataaaaatagtcaagggcacattcttgatggtagataactggtctctggccacagcggctgccaggttgggtgtcggccggcgggtctgccagtcccacccataggcactgcacttccctgggccggacagggggtgtggcgggtctgtgggcggggggacaaggttggcaggaccgtgaggggggtggtgggtctgtgggagggggacaaggttggcaggaccgtgaggggggtggcgggtctgtgggcggggggacaaggttggcaggaccgtgaggggggtggtgggtctgtgggagggggacaagggtggcaggaccgtgaggggggtggcgggtctgtgggaggggggacaaggttggcaggaccgtgaggggggtggcgggtctgtgggcaggtggacaagggtggcaggacctgtgagatgatgtgagtgcagcacagtggggctctgtaagaagcgacccgggcagcttgagcaggggcaggctgggcggtgcctacgggtctctgtccaccggagcctctgttcagcccacctcagtgtcgctccggatgtggatagaaggagacactgtctgggccacagaccaggtgcttccttcgtcctgaccacacctgcttctgcccaggagacgctgcaggggctgtgctccccgcccggctactcttgagtggtccccaggctcctcctcctcccggttccacctggagccgtggggctgtgccggggatgcctcgctgcagctgcagctcagggagaactcactgctggagcttctgcctctcccgtgccgtggggccgagccgagctccaccagggtctggacttctgcacgggcagctgtgcttcccagggtcgtggagaggggtccttggtcccagccactgtgtgacctcgaccaggacacttgactttcctgcccccagagggtcttgtctggacctccagagcccccagccttgctcacttggctctgcttctgggcagggtgccctggcattgctgttgctggcacctgccgtgccttggaggggtctccagtgggacctctgagcacggctcttcctgtacttctcagaggtgagcagagggcatttgtgggagaactggaacctggggaggaaaaaccccaaggctggcaaagactccctgcagtctgtccagtgatccactgaggctgagtggtggaggacatggaggccggcccgggaccaggacatggaggccggccagggacctggggaagagagggcctcagtctggtgagaccagcctggtgggtgcctggggaagagagggcctcagtcctgtgagaccagcctggtgggtgcctggggaagagaggccctcagtccggtgaggagaccagcctggtgggtgcaggccacccttgcctgctgtcagggcctgcccttctctccggcctccagctgctttgccccagcgatcaggcgcctgagcttcctcccccgagcctgagtccagctgagctccgtgtggctttcccggtggagcagactctgtctgatttcccaacggctggcgcctcccagggcgtgctccttgccacggaacagccccttggggccaggtgtgtactccaggcagtggcccggcagtgctgggaagtgccggtcatggctgctgcacgtgggttgctgtctgggagagtcctgtggtgtttgctgagggcggaggacaccgaggacagagaatgggcaacttccagggagggcccagatgcagccacgactggggtgcatctgggatacctcgtccagggacactccccaccatggcctggtgcctgtccagcaggaagagcttcagggcagtaggaagggggagtggccccagctgcagagggaaggagcttggtggcagggcggcaggagggatgggaggtcaggctgacgtccactggcgagaacacttcagatgaagatagtgtggacccctgcccagtcccaacacaggccccagacgccctgaaaccccaggggctcagcccaaagcaagggcaggaagcattgctttactgagaaaccataaaaatgtagaattccacctcaaacgctgctgtggccgatactgaaggttagaaatgagccggtggggcccgacacggtggctcacgcctgtaattccaccactttgggaggccgaggcaggcagatcatgaggtcaggagatcgagaccatcctggctaacatggtgaaaccccgtctctactaaaaatacaaaaagaaattagacgggcctggtggcgggcacctgtagtcccagctgcttgggaggctgaggcaggagaatggtgtgaacccaggaggcggggcttgcagtgagctgagattgcaccaccgcactccagcctgggtgatagagcaagaaaaaaaaaaaaagaaagaaaagaaatgagcaggtgggtgcttcccaggggggccccgtggcctgtcggccccatgcatgatggccctcaactcagccacagctcccagggcagctgtggctccttgggtggcccaagacagctgctgcgtggtgtgagcttcgctcatgaggctgggcagaggctgggatcccaggtgtgaagatgggcctgggtggtggctgctggaccttgttgtcacagatgtgccacctgcttcccaaaaccgagcaccaggggtctgagaggttgctatgggaaggtcgcttgctccagggggccctggaacagttgctaagtttaacgccctggcccaggatccacctgtcctgctgcagaccagccctgctcattcctccctctggctgtgaagatggaagcccatgggttggatgcctcgggccagggctgtcacgcaaggaagcctggggaggactgtggcactgaccccatgggccatggtatcgcctcagggccctgcccctctgatgtccgtctcctcggggccccgcccctctggatctcgtctcctcagggccccgcccctctggatctcgtctcctcggcgccccgcccctctggatccctgtctcctcggggccccgcccctctggatctcgtctcctcggcgccccgcccctctggatctccgtctcctcggcgccccacccctctgatccccgtctcctcggcgccccgcccctctgatctcctctcctcggggccccgcccctctgattccagtctcctcggcgccccgcccctctggatctccgtctcctcggcgccccacccctctgatctcggtctcctcggcgccccacccctctggagttccgtctcctcggggccccgcccctctggatctcgtctcctcggcgccccgcccctctgatctcggtctcctcggcgccccgcccctctggatccccgtctcctcggcgccccgcccctctggatctccgtctcctcggggccccgcccctctggatctccgtctcctcggggctccgcccctctgatctcctgcacgcacccggcctcgcctgaaaagccccacgtacagcaaagcggccgtgtcttggtggcctctgcctggggcgctatgggtggcctgtctatgcctcagtttccccattcttgatgagagggagctggggtcgctactggtcactcgggccccaggcagaccaaggctcacttctgtccactccctggccccattcccaggaatcccaccggttcctggccggggtctggaatctgttctcccagtccaggacctaccctcccctccacttcctgcctgcaagctctgtggtccttccttgtcttgagtccagggttccctgtgctcccagtccagcctccctactcagggccgagggcaccaggaggatggtcgttgcaaaagaatatgggaggccgggtgcggcggctcacgcctgtaatcccagtacttctgggaggccaaggggggcggatgacttgaggccgtgcaacacctgccagcaccagcatttgacacggaatcgaagaaaacaggcaggacataccctgactacactagtacaagtcatcggcgtctcggggtcctgggttttagaaatcacactgtcagggagggctgatggggtcctgggttggaggctggaagtggaggaatcgaggcataggcagaaacttgaaggaagggtcagccgagctggccagaagggggctcctcgccacggtccccagggaagcactttgctcatgggccccggccctgagagaggagctcctgcctcttcccactcggagagggctgacaggagaggcttggcctggtgtttcctgatgagatagcgggcacgttccgggaagcggtgagcaggcccagcagacatcagatgtggtgcttcctgtctcctgtgaatgcgcctggcccttgaggggggtctgggatggagagtcgggggaggggaaccccactcgcccttctccttgttgttcttggcagctggacttgggcaattgtgcctccaccctctggaggggcctccccctgtgctggctgcagatcagaggggcgatggggagggatccaccggtccaggcgggggctcaccttccagacccgggcgtgggcgagaggggtgcatgggaggacgcccgatgcctcagggcccccggtcagcagcgaggcacagactctcctctgggcggtgatggccctgcacgaggtccgtgtgccgtctgcctgcacagggagaggaaaggatcacgcgaccatgggtacgttggccacctgaaggttgagtcccgcagcctagagactggagcgtggggaccaggaggagcttcttagcggaactgggctggggctcatgcagccctccaggagcccccgacgcgacgccctggctcatcccgggtgaagaggctgctgagtctgaactgatgacagtggacgggtggccgccggttcccaacgcatggttgggcctggaacccaggtgactctgggagatgtggtcacagtcacagccgtctgtgggcctttgggttcaaaacagcgcgagtcacaggagacagaagggaatctgagcttgcgattgctcattcttgtcaccctcctggctctgggacacctctgccatctcctaccaagggtaccccattcctggcgagttggaaagtggcctcatgggcagaaaacgagggcaaagggagctgcgtgctgtgagagacgtccccgcacccaccctccccaccagctcccttgggcctttcctccctcccagccccacccacagccgggtggctcccttcactgtctctcctgggtttaactcagaggctggcgagcaggggctgaccagtgtgtgtcggagactctccgagtggccagcacgggcagggagctcataggcttggccctgagaccaggtcctgtctgagaaggaggcaggtcctgtctgagaagaaggacccccacccctcctgcctgggaccctgccttaggctcactctaatgacctaatttcaatttgattgaatgcaaatctgaatttgctagaagacctgatttcatctttccgggttcagtaaacatgacattctccgtgggggtttatttgtggaactcccagtcagagctgctgccccagcccagcagggctcagcgacgtgcactggttttaggagtaaatccgaagcaacagaagcgttcgcactggctctgggtgcagcctgcatcttcagccctggggcactgatgctgggcagcttctcggcttcactcgggaagggactcaggagcgaggtggtggggaagccagcagcttggctgaggcggcagtggaggtggtccagctccgcgactgctcccacagagcagggctgccgctcgggcagtgtgcagagtgcagccgcttggggccaacttgccatcatatgtataaccacttttaatgacatgctaattagggggcgggttattcagatatagctggaggatgggcagttgcttccaggtgttgccaaggcagtgagagcaacgggaactgcccttggcgcctcttccagctttggcctgtctttggtcgggtccggggaccaggcttgcctaccacgttttctgtgtcaaaacagtcacgcagaaataaacagtgacagcactgtgatgagaaaagcgaagaaacaacttatttcaactttctgacttttgttgtggcctcagcacttttgtttgtgcttaacattgaaaacagtgaggcagtgtaaactgtgagatgtgatttttcatttggtaagtgcaaattttagttcattcatgaaaccagttttgaagatctttaaaatagaatttagtcgaccttaagaattgttaattgtttacaactaaagaccaaaaatccaagagaataaagcgttgcaccagtggtaggggtttgtagttgcctaaattgtaccttttacagatgtttcattttattaaaactcactagtcactggatcttctattcaacatggtgatgggatgaaattatgtatgacaactgtgctccctgaaaagacatgtttgcgtctgatcccctggggtctgtgaatgtggccgtatttggaaacagggtctctgtagacataatcaagttaggatgacatcatgaggacaggccctaatccagtatgactggtgtctttccgagaagaaaacagagacacagagggcgagacccacgtgaaggcagaggcagagattgcagcactgtggccaaaggccaggagtgtccaaaccaccagaagctgaaagaggcagggcagggtcccccgagagtggtcgtggggagctccctcaggcagatacctcgcggtcctgcaactcctcgatcgcagactctgggctccagagctgtgagacagttcaattctgttgttttaagccaccttgtttgtggtcatttgtgccagcagccccaggacggtcacacgtgcaccattcactgctgtattgggttagacccttgcactgagggctttgggaacctgactgggttggctgctggacaggggactgtgagggctgcggggggtgtcggcgcaggagtggaaggtgcccctgctgggatgggggtccctctgtccccttctccttctggagagagggccctcatggggctgcccaggacacagagctacttgtaaaatcctgcccccattccagcctggggctcctgctgggggcagggtccaggagcttcgggacaacatatggactcagggcccgaggtggcctttatgatatccaggtctcaaaggaggggatcccggggagcttgggatgcggctcatccccagcctgagtcttcttccttcactgtcacctgttgcccctctgggagctgccgttgagaatgaggaacgttccaggtggtctgtgccagcaacaccactgcaggctcgggggcggggggagacgggcacggagtgtcacacacaggtgctggacaggaagtgggctgagggccagcgcaggaggtggggggcagacagggagggggcgttgcccaggtgctggacgggaaatgggctgagggcaagtgcaggaggtggggggcagacggggagggggcattgcacaggtgctggacgggaaatgggctgagggcaagcgcaggaggtggggggcagacggggagggggtgttgcacaggtgctggacgggaaatgggctgagggcaagtgcaggaggtggggtgcagacggggagggggcgttgcacgggtgctggacaggaagtgggctgagggcaagtgcagggggtggagtggccactggacctggctgaccagagcagagaaggtctatgaagagagatgggagaggaagatgcagaaggatttaaaaatagggctttgtaattttcaaacagcatacagtatgctatgaaagaaaggttagaaaaattttttaaagttagctaaaatcccatcacctggagataaacacagatgacattttaaagttgcacccgagttaaacagtggctctgagcatcctcagaagatgaggcactctctagttttctgagtggggagtttagtgacgaagctgttgcttcgggaggaggacgagggcagtgtgggcactggtgggcgtaggggggacggggctctgggtgaggacaagcagagggaggctcacagtgccacaggcaggtcccagcctctgccttcaggacagaccagacccctcagcctctgaactgtgttcgggcaaacgggattacgactctgagtgactggaaggccccgcttggtgctgagtgcactggcacccatgttatgtctgtggcacaagcgctcgatgaggtctgcacgatcactgcagatgatcactgcaccatcattcctcgctgcacgatccttcctcgctgcacgatccttcctcgctgcaggatccttcctcgctgcacgatcattcctggttgcacgatccttcctcgctgcacgatccttcctcgctgcatgatgattccttgctgcacgatccttcctcactgcacgatccttcctcgctgcacgatcagtcctcgctgcaggatcagtcctcactgcacgatccttcctcgctgcatgatccttcctcactgcatgatgattccttgctgcacgatccttcctcacagcacgatccttcctcgctgcaccatccttcctcgctgcacgatccttcctcgctgcacgatccttcctcgctgcacgatccttcctcgctgcacgatccttcctcgctgcatgatccttccttgctgcacaatcattcctcgctgcaccattattcctcactgcacaagggaggaaactatagcacagggagggtgagccactcgcccagggccacatagctgtgaggggagaactaggaattctcatccagccttcaggaaaattacatgtggactggatgtgacggatcttgagccacgctgacaattgagtccctgtccctcagtgggtttcagaagagaggcctcccctctcccacatcccaggagctcagaggccctgggatgggccgacagttcttggccaggtggctgctcctgcggtcacagcacttggaggtgctggcctgcgtgcagacgccccctgtgcctgtggggtcctctccgggcctggcctggcctcagtcccactggccaccctcgctcggggatcgctaggggtccttggacctcagaccatgcagggcctccctttgcagaacaggaaaataggacggccaccctcaggccaccgtccatgagcatcacaggggcaggttcttatctctgggctggacgtgtcaaggctgggcttgggggccagaagcttcccagcaggcctcccactggccacaagacacaagcagcccctcagccctgcagccacgtcctctctgacagggcccctcttgccccaagcccagccgggccaccgtggccagctccacacacacatctggctgagcactcacaccaggctgcggggtggtgtcacggcccaggaatgcaggaagacgtctggggctctggcagagaggcatggccatgcgccaagaatgtgccttgtagagacataattatgcattgggggaatacggcgtaacaaacccggtggatgccaccgactccacttactttactgagagctgagaggacagcaaagtgcggcactgaccctcaggaggggagggcgctggctggtgcccaccgtcctgcagaggactgagggatgcgtgggcatgggtgggcacaaccgtgggggcgctggcctgggggaggaggaaggaggccgggcgagggcgtgggcagcgctgtcctggctgatggctgaggagccagggcgcggccgcaagtgcgtggcagcgtggcagggcggctgaacgaccccattgtgtggagtgaggccgaaaggccaagtgggacgggcagggaaagaagcacatttcataacttcagtccactgtgagaggactgcctgccccttttagaaaacttggaaatcacagcaagtctccagcagggaaacaacgccatgggggaggggtcttatctctgggctgcgctatctccccacccaaagaccacgtcagccttccgggcatttctttcagaattttaagccacatgtctgtgtgtgtctctctgtgcgtacaaacacgtctgtttatgtgtgtcctcacatcgctggggtcatgttgtatgtgttgtaaaaattactttttaacttgtgtaatatgtgtatatatatataacaaaccctaccgtcttaactgtttttgaatctacagcttggtggcatgaaatacattcatattaactgtaactgtcaatttccagatgttttatcttcccgagccgaaactctgtccccattaaacacgaacttcccagtccccctcccccagcacccaccgttctgtttctgcctctatgaagctgacaacccagggaccgcgtacgagtggaatcagcaggatttgcccttatgtgtccggttatttccctcggcacagtgtcctcagggttcatccgtgtcacagcaagcgtctgactttccttcctcttccaggctgggtcacagcccttcatgtggatggaccacgttttattcactcatctggcaacggtccttctggctgttgtgaataacgtggctgtgaacgtatacgtcttgttctgttcaaagcaaaacacacattttcattctttcaaaactgtccttatgtttcctgtggaatgccctggactcagggtttgggggagccggtcattatatcacacccggggttttcgctggaaagagcctcaagccgtatgtgctctcccgacgccatcctccccacagttggctgttgagaattttttctctttggaggactgtggggtctctctagcctggccatcctgagtccaagtttcttttccctgacaacagacaaatgagcgagtagccctctcagtccacgagctgacccttcagaggctggggttgcaaaccctgatccttggtgggctggggtcggcctctgggagcccctccttcagagtgaggggctggtgcaggttttcttttctcctcactgagagttttttctgctgcctgagagaagagggtgaaggctcccggtaaagaggatggggtgcaggctcctgagcccaccgacagccccgtccagcgctgacctgtgggaaaacggcctcttggcaggtcagtccaggcggtggtttccctggagccaggggctgggttccagagcccggccttccacccctacagcgggcagggctgacgggcgcgaaactgggagcgtagctctgggaggtggcctcggggaaccattttcccaccgggcgggcccttttgttctcctgtctgtgcgcgcagggcagccaggtcccgggatggaccctattttgagagatttattgactttctttttcttttgaaagggctgtggccaggcagaatattgaagcgaaggagcccgacagtagccgctctctcagggtctaaggcaacagagagctcccaggtgtgtatagagcggggcgggagtcgggtctgcaggacggccggtggggaaaggccacgaggtctgcagctgggggccgggccgtgctcagcggtgtgtggtggggacaccaggaaaggctgtggggggtcttgggagtcggcaccctccctgaggggccctaagtccctgccagcttgtggaaccagagggtccctggaacagtctgtgtggacccccagggtcctctctccacccccgggcgttgacctcctgcgggatgctgacctgactcgggtgtgtgggggtgtgcccatgtgtgtccttgagtgggtatgtgtaggggtgcgtgtgtgtggctgtgcaaatcgccaacgacaatcttccgtccagggaaacggacgccgtgtccctaggaggagtgtggcttttcctgtcctgggctggggatgtgggaccccttttaacctacttttgagagcagatctgggggggcttgttttttaaaaatcacaaaataaacataactattgttctcccactgatgaaattacccattttcacgacccaggggcgatctgttttcatcccttcgtgtaggccactgcggaccttttctccttttatgcacacgacagtatgttttcaggcttttccaaattaggagcacattttatatatttgtataattttctggattgatttttaaaatggaatcttgtggacagacttctgtgaccttaactgtggatttacatcaggctaatggttgtgaaggtttttattttgtgaacaccatcaatggatgttgagattttaggttccctttttccttgcattataaacaatgctttttctctccttctccctttgcatacactcccagcagtgtcagtgagctggggcctcgtgctcctgggtcctggcggggcacgaggctggtacggggagcttctcctagactgtgtggccccttagcagtgttcctaccgtgcaaaggcccttcctggtttacagaaaggatctggagggggagaagagcctcgcggcccgcatgatgttggaccagcgtttgcctccttctgaggcccccgcctcccaccaggcctggcgctgcttttcacatctccgccccagcccaggtccagcgtgtctgagtgtggactcaccctctgttcccagccccagtccatggatgtgaataaaacggaaactagaattcaggagcctgagaggccaggatgccaatctctgtaacctcaggacagaggcctaggggcaggggggcctgagtgacaggccaggggaaatggggggctgtgtgacaggccagggacaatggggggctgtagccatactagccatacacgggctgaggcccagggtgtcccctggccgctgtcctctgcataggccctgaggccagggactcctcccaccttgttctgggcactgggggctcagctcaggcctgttccagccccactttgatgcccaggaagtcccaggatgaaatcacagggacagaagccggggctacggctaagaccctttgacatggaaatgctgattcggtggctcaggggcttcccacccagctccctcgggaggcctaggccagggcgtcagggtggggtgcccgagcctgttctccctgccggagggccggtgtccaggggccattgtccaggccagggctcacccgaaaggcctggagcctcacacgctttcaggtaggaagtgtcctcgggagcctgggtggcccctgcagttgttttgggaaggttttgctctgattttttcctgcatagctgaggtaagtgcagtttttgccctttattcattggagagtctggcctgtcccgccgagcacagcgtttccctcacgctggccgtgagcacacaagggtgtccaggggccacgcaagcctctggaaaacagacagacgccagtgctgtaccccctgctgcggtccgcaggaccaggaccccgcgaccctccttgaaggggcaggtccgctggtggtggggggcacagaggggcccaggccggggtgtctcagaggaaaccagccgcccacagacatgctgggcacccatatggtggagtcctcttggccacagcaagggatggagcccctgacggactcaaagcgtgaagcccagagaaaggcaccacacgggagcacgcgggggtcccaggacaggcacagccacccacgcggccacaggtggggtcccggggcaatatatatatatatttttgagacggagtctcgctctgtcgtccaggctggagtgcggtggcgcgatctcggctcactgcaagctccgcctcccgggttcacgccactgtcctgcctcagcctcccgagtagctgggactacaggcgcccaccaccacgccccactaattttttgtatttttagtagagatggggtttcaccgtgttagccagggtggtttcttatctcctgacctcgtgatccgcccgcctcagcttcccacagtgctgggattccaggcatggccaccgcgcggccagcacggggtctttctttatttcccaggtgggtcttgaactcttgggctcaggtggtcctcttgcctcggcctctcaaagtgctgggattacaggcgtcagacactgcgcctggccacattttttatgtgtgtgattcacaacaggggtttagggaagggaagagatagcaaaaagaaaagttctcgtctcagtcagtacccctgccccaacaaaaaccccaaccaaaaagcctcacagtaattatctccagcaatttccaccctttctccctaagaaatttgagttgggtggtgggtgggagggcttgtgctcccccagaagcactgagggagagggaggtgccagcgtccaccctttgtgttaggtttaagcaagtgctgtctctggtgcgtggggccagggccggatgtcgtcgaaacaccggagcagcccaggactcgtcgcagaggggagcagggtgtatcttacaggggccgatggtgcagtcaaacctcagggtctacggtttttatggttgcctcgagtctcgtccaggctgggttgtcttggaaccgggtctcctgtccagtgtttgcacggtgtcattaaaaatcacaaaacgtatggaagtggtgggtaaagacttttcaactttggtgattttgttcttcccaatggtggagagagcttgcagggtcaggagctgcgtgatgagcttgctagaagtccatgggtgaaaacagcccttgtgtggctcccgggtacggctggccgacctgcctaaagccaggcatggacccgaggtgcccacactgcttggagctggtggcacagggcccggtgtcccttggagaatcagatctgcctccatggactcacacctcctgtgtaagtggcgggttgtgtgcgtggggtggtgggacacctggcaggtggcagaggcggcatcccagggggtgactgacttgcgatttttcttctgagtgggcacccagcctccttcgatgccctcggtggggagagtgaggggcacgagcttggccctggtgctcagacgcttctcggttcactccggggccgcaccctcaggccgctccatcttggacaagtctcttggcctcgctgggccctgcgctgtgcagcctctgccctttcctctccaggttcctgtttcaaagcatctctctgaggggctggggtgccacaggggccaccatatgggagggcggtagcctcacaggagccagcagtggggccattggggcctggctatgggcagctaggtggcaggaggggctgaggggtctctgtggttgggtctgaggtgaggcaggtttgagttgggcgggactggaggggaggggaggcgacgcggggcccatggaggtggacttggtccaccgtcaccccacaccttcctccagcacatccttcccgtgggtggagtcacagccctgagcttcctctccctgcagccctgtgggggaatctgttctgtgctcaggggacggtgcctggtcctgggggctgggcagagctcggaggggcctgccccggcagctttggtggctcgggtgctgcagaggccggcaagggcttcggctccgagcttcggtgagattgaggccagcggtgcagcttgcaggacgctgaggtgctgtgagccctggaggccgactccagactctggccagcatcctggcagctgggtgaccacaggctgtctctacagcagccaccactcccgacaccactctcgggtcctcctggtatcgagggacctgctcggggttgccgtggagctcggagctgcagggtggctgaggccggaggcttaagaccccagtgtcaggagtaaattaaaggcgggtgaaggatgagcgtggattgtgggggcagccaggagcccaggacctcgaggcctcgtggggccgggcggctttgctggcctcctgcagctgacaggcgccctggtgggcaaacactgagaaatcgtgatgggcgtagagatgactgaccagaacgtgcaggaaggaggtgctgagcctgaggaaaggctcggacgggcaaaccgcaggagagctggcccagctcaactccagtcccactgcagccgggagtcctggggtgtcccacgctgacaccggggagggagtcgtccagaaagcagcacccactcaactggagaggagtctttctccacacatgagctgggggtggccaccggccctgtcgtcctcagagactcatggcccgtccgcccagccacacatccctctgtccagcgtgctcgggcagcaggcactgtcgctggagtgtcatggccaccccagggcttaatttggaggtgccagatttgatggtcatcagcctgggtaggattgagggcttgtcccagacagtcaggagacaagctgggagaacatcactggagacagataataaaggcactgacaagccctgcgttgacatgaggtgctgtctggaaaaggctgagcctggtggggaatgggtcccctggaacgcgggcctggacttggaggacagacgtaaagcatttgaaggtctcagggtgacgttgaaggggcagcaaagagaaactgaagactgagctttcagaagctagctcaccaaacagggaggccaggtccggttgccccgcaggcagtggcagatcccagcttttcgtgttttgtcctagtgcccaaggtctaggagatggttttattttatttttagtttttgaaaaatagagatggggtctatgttgcccaggctggtgtggaactcgtggcctcagcggatcctcctgccttggcctcccgcagtgctgagccaccaggcctagctgattctgtaagccacgcaggtgaataattctgcagctcacagcgtgggtggttgtctctccggcaacctgacccgcaaaggacacaaccgcaggagagaggtcaagaggcccctgcctgcgggtgttaggaggtgtcatcttaacatccatgttcatggaagacgtgtgccttcaatggaaactgtccgtcgtctgggtcaaagttggctacaaaaaccttctgggggcttcctggtcggagtcaacgtttaccatatagaatgcgggcttctgggcataaggacagcctagaaatctctctgttatatagacattttcctttttagaatttgaccttgatgtgcaaaggaaataagtatactattgaggtattattatttggtccacagttttggaagcctcccatgtgtgcactgtggtcggggttgtgtgtatgacacacccgcttggcccccaaagagcttgccgtctgcttcctcattaccgtacaccaaacaaaggccttggacatattgctgtacgtgttctatgtgcacataaacttggaactgaacacaaccaaacaggttgcttacctgcaggactgtcagaaactttaatgagcaaatgttcattgtgcatctccttaggcaacagggaccttgggctgggacaggctgtggggtcttggatacctggcatgatggtttaaagtatatctgctactttgacagccctccttccaaaaggtagagcccggttcctctcccctgaacgcgggctgtgcctccggacctgcctttagtgagtaggatatggtgggagtgatgctctgagactccccaggtgaggtcagaaaaggatggcttctgcctggtgcactctcttgtcattcactttgggggagcagctgccctgttgcagggcctgtaagcagcctgtgaggctcaccctgtggggaactgaagcctccccagccttgagagggggctaccgtcgacctacctctcgactgcaacctcacagcagaccccaaacaggctcagctgagcagcgccaaacccctgagccaaagaccttgaggataatcaacgttcactgttgtgggagtcactaagtgttgttctgtggccgtagctagctcatgaacctggcatggaggttgggttccgttctggtggatgtggggaggcctgggaggttactgtgtggggaggagacgcaatgaacagccagtgaagcctcagagatgcccctgcagtagctagagtgtgaggggtgtaagatagtgggaacggaggggctgggagagctcccggggaagaatttcccacatccaggacgtctcttcctcactcacgtgcccaggccgtgccgggagaggtgctttgtgaagcttgggtccgggagagccggggctccaggagggattagctctgctcgtctaaactattaacatgtctgcctgtgagaaagtggtgcttgcacctaagaacaaagcgccttcccctgtgcttgcatagcgaccccccccattgcagtatatttgatataaaagcatgttctttgtgtttatgcttaatcattttattattttactaaagaatcctgaaaaagttgttgttctgtgcaggtgtggccgcaagactggcagcagaaaggcacttttgtaagaagagggatgggagaagcacagaggtggacctggaaaagtcaaagggaagctgtgggtggaagctccggatggctgaccccgagttccagctcaaagaacagagatgggtggggtgggaaacacagcggaaagagcggcccgtgaacgagggtcctcggcagcaggaccgccctcctcacggacagatggcaagtgctggggaggcgggggaggaaccagcctgtcaccaccggcgggaacgtgggcgggcgcagccactgcaaaacagccggtcactcctcagataacaggcgcggacttcccacacgacccagcaatccacgcctagatgtagccaaagagaagcagaaacacgtcccccgtaacacgtgtacctggtgttattcataacagcgaaaaagtggaaacagccccaagttcatcaacagacaagaaaatgtggtacatctaccaggcgcggtggctcacgctttaatcccagcactttgggaggccgaggcaggcggatcacctgaggtcaggagatcgagaccatcctggccaacatgatgaaaccccgtctctactaaaaatacaaaaattagctgagtgtggtggcgggcgcctgtcatcccaggtactcgggaggctgaggcaggagaatcgcttgaactcaggaggcggaggttgcagtgagccgagatcgcgccactgcactccagaatgggcgacagagcgagactctgcctcaaaaagaaaaaaaaaagtggtatatctgtgcagtgtgctattatgtgaaaataaaaaggaatgaagccctgtcatatgacaacatggatgagccgtgaaaagatcatgctcagtgaaagaagccacacacagaaggccgcgtagtgtatgattccatttatacgaagaggtaagaagaggcaaatccagagacagaaagtggacactggttgcgtggcctggggaggggctggggcggggcttgggaggggttggggaggggctggggaggggttggggaggggttggaaggggctggggaggggctggggaggggctggggaggggctggggaggggttggggaggggctggggagggttggggaggggctggggaggggttggggaggggttggggaggcgttggaaggggctggggaggggctggggggttggggagggattgggggaggggctcagaggggcgggggaggggccgctaatgtatggggtttcctttttgtgtaatgaaaacattctaaaattagagagtcatacaaccttgggaatgtacaaaagaccaccggattctacactttaaatggttgatttttgtagtacaggcattttttcctcaatgaagctgtttgaaaaagaaaaagggaaagagaggaagagagagaggtgccagttggggaggaaaagaggaagaggaaccttgtagagcagagtgcaggtagaactgcaactgaaaacaggaacctgcggtgcaaacggcacagcgtgcaccgtgctgcctgtgcgctcccctgtgcgctcccctgtgcgctgccctgtgcgctgccctgtgcgctcccctgtgcgctcccctgtgcgctgccctgtgcgcttccctgtgggctgcctggtgctgccctgtgtgctcccctgtgtgctgccctgtgccctgcaggtgagccgtcgtggctggaagcaatttcactttcgtgtgtcaggacagaggaaaagacgaattttgcatgaagcgcaggtctggggcttttcctcccagttggtaaaaaggagctgacagagaggctgcgtgttggtgtgagtgtgtgttgcaggcattttgtctaaccagaatgatgagggtgcatcaaggctgtcccggagagtccagatcgtagattattttggacccgctgtcccggagagcccagatcgtagattattttggatcccgtgtcccggagagcccaggtggtagattattttggatcccgtgtcccggagagtccagatcgtagattattttggacccgctgtcccggagagcccagatcgtagattattttggacccgctgtcccggagagcccagatagtagattattttggatcccgtgtcccggagagtccagatcgtagattattttggatcccgtgtcccggagagtccagatcgtagattattttggatcccgtgtcccggagagcccagatcgtagattattttggacccgctgtcccggagagtccagatcgtagattattttggacctgctgtcccggagagcccagatcgtagattatcttggatcccgtgtcccggagagcccagatcgtagattattttggacccgctgtcccggagagtccagatcgtagattattttggacctgctgtcccggagagcccagatggtagattattttggatcccgtgtcccggagagcccaggtggtagattattttggacctgctgtcccggagagcccagatcgtagattattttggacccgctgtcccggagagcccaggtggtagattattttggatcccgtgtcccggagagtccaggtcgtagattattttggatcccgtgtcccggagagtccaggtcgtagattattttggatcccgtgtcccggagagcccagatcgtagattattttggatcctgtgtcccggagagtccagatcgtagattattttggatccagaagaggaggagttctgctttctgaatttgtatggcctgctccacaaatgaaacaagaaaaactcctgaaaactggcagcctatctttcctgtaagaaagtggtgttgggaggccaggaaaattacctttgttttgtctgaggagaggggatggcagcaggacggaggcttcatgtctggtggtgaccaaaagcacattttcaaagtgggaaatatactaattagtggaggaataagcaaaggagagaagcgtaggctcctcccaacgagccactcgtcagagagccggaaccttgtctctatcaagctgtccagggaagacgtgtttggcccccagggctgcagtgcacccaccccacacacactggtgcttgaagggtcaagctagagcaaatcagagaatcggggggtccctgttggtggacccaggagtgggaagaacgcggctacccgaagtcttggcaccaacagggagagaacagtcaccactaagtggaggcattgtgcgtggcggtgggattgtgagaattgtaccatggagttgtttttggtttttagaaaacttccaggagctcagaaacagagcacagagctcatgactcggggcaagctcggagcacaacgtgaggaccacttgatcagggttcggagaccaggacccagtgccgtgagggcttcgggtcccccagctgcaggttcagtgccaagttcagggcactgaagccagggccacaggaggagccgccggagcatatgcagaaggaagaggaaggaggagctggagaacatgatgctgctaaccccagatgaaagcgtgtttgcaggaaccaggtgggaactcctggagacggcaggggaaccaggtggagggcggctgctcagttgtatctgtacatgagacttcaatcagcgccttcgctagcccattcattcacctggcatttatagaacgctgctggtgtacagggtgaacacaacagccaaacatcttggttcctcctcagagatggccggcccagagcctggacatctgactcaccaatactctagtccgtcaaaaggacacacaccaaaggggaagggacctgctggccacaggtggggctgaaatgggttgaaatgtgttacacaactcacatctcatgggttcataactatcccccccgcaaaaaaaaaaagcaaaaaaaaaagcaaaaaatgaaaagaacaaaaacaaaaaagaagaaaaagctggaaaccagagagaatgatgccaggaaccaactcattctcctgaaaatgcgtcagcgaaggcaacaagtgctcctcctgcctttcccggacgcattgtgaccaaccagaaagttctcatggaaaacccggctaacggatgcgagaggagtgtggtaagattcgctgtggacagtccaggaccgagtgctggcgtcgacaccaagagctccttgaaggacacgctgggaagcacacagccctgtgaattcactcctgccgagaaacgaagcttatgttgccaacctctgggtctgtcccagggtcccaggaagtaccggctcagaggagcatatgcgggtggcaccggggggcgcagcctgcagtgctggagggagggattccacagggcaaacacccagctccttcagcagatcaaaagggagaagagtggtaacaactaattggagaattctggatattgactgtttatttgattttttttttttttgagacagagtttcactcttgttgcccaggctctagtgcaatggcacgatctcagctcactgcaacctctgcatcctgggttcaagcgattctcctgcctcagtctcccaagtagctgggattacaggcgcacgtcaccacacccggctaattttgtatttttagtagagacgggatttcaccatgttggtcaggctggtcttgaactcctgagctcaggtgatccgcctgcctcggcctcccaaagtgctgggattaccagcgtgagccaccgcacctggactgtttatttgattttaaggctacttcgtgtttaggtgtgacagtgttattgtggttaccctctttaatactccttgcatttcagcagcatttgcagggaaaatgatataatgtgcgggatttgcttttccacgtatgagagagtgggatgtggatgagcaagatgggcgagtattgataattactgaagccaggggactggacactggggtttgtcttactattttctctacttttgtattatgtttgaaatttttaataacacaaatgtatcaacattgaggcccttgtggagcctacaggctgatgaacctgtacgtgtgtgagacgatgaaacgaacgagaagacggcctaatgtggtgcagaagaaacgctgtgaggaagctggggaggagcgtgggggctgtgatgttagaggggtggcctcactgagaaagcacagcacacgctttaggggtggggttccagccaagaagccgcacagcagaggccatggctgggactggagctgctatggcccaaggggaatggggaggaggccccccagccctggttggtgctgggagactgtggaccaggtgggttggacatggagcccctggagggctcgggcagccgtggcaccatctgggggcttgttgggggcacagggagacctgttgaccgggccccgccagggaccaggcagagcttatgctgctgggctggggctggccttggagagcttgtgtgtgtggagcaagcctgtgcctcagtccgttcaaaggagcccgagaaagaggagcatcccccggatggggcccatgaagctcctccctgggaagcagcctgagggcacccctggcccaggggctgagtcctgacggcgtctgcaacctctgggctgtggtctccctgagccctgatggcatctgcaacctctgggctgtggtctccccagtcctgacggcgtctgcatcctctgggctgtggtctccctgagtcctgacggcgtctgcaacctctgggctgtggtctccctgagtcctgatggcgtctgcaacctctgggctgtggtctccctgagtcctgatggcgtctgcaacctctgggctgtggtctccctgagtcctgatggcgtctgcaacctctgggctgtggtctccgggagccttgacggcatctgcaacctctgggctgtggtctccctgagccctgatggcgtctgcaacctctgggctgtggtctccctgagtcctgatggcgtctgcaacctctgggctgtggtctccgggagccttgacggtgtctgcaacctctgggctgtggtctccctgagtcctgacagcgtctgcaacctctgggctgtggtctccccagtcctgacggtgtctgcatcctctgggctgtggtctccctgagtcctgacggcgtctgcaacctctgggctgtggtctccgggagccctgacggcgtctgcaacctctgggctgtggtctctgggagccctgacggcatctgcaacctctgggctgtggtctccgggagccctgacggcatctgcaacctctgggctgtggtctccctgagccctgacggcatctgcaacctctgggctgtggtctccccgagccctggcaacccctatccctctccgctctccttcgggcacacagcccggcatctctgctctccaagggctcgtagtgcctgaagccgacactctctctcctgcacacacacaggtcgatgccttcttgttcccagtgcttcagaacagagctggcagcggctgcggcaggagcagctcccactgacaggctcctgcagcctccttcccacctgcacaggaaaaaagcccgcatccattctgtaaggagctagagcagctctttggcatcctgtacaggccttggaatgcttcagggaaaaaagatgattccgcatcagaatggctgtggtcagacttgctggcagaagcctcccccaggctcttgacatgtggcttctggtcccttttcctgccacacccctgggttccgcgcagacctgggtccttgaagaactgaaattctagctcaacctcggcaactctgtagccattcgctggaaatttcctaagagaataaattgcaacacagtgcggcggatgggctgtgtgggtttatttttaccacgcgcttagtgctataaagacgtcaccttaaatcaggagcgtgcaggcgtcagtaggaaatatgtgcatgtggcaggtgacgcaggccacaccctcgccctcgaacccctggcttcctgcacctgagcgggtggagcccagcttgactccagccctgacgatggacctgggtgcagaggggacccctggtgacctgcaaggtccgaccttctgtcccttcatgcagggaacctgtggggctgtcactcctgagggaagctctgagtctgtttctctggggatttgccaggggagaaggtcatccacctgtcggctggtaagacagggttccctgcatgtgatgacaacttcctttcaaagccagcagcttgcacagcgtttgctcaggttctctgaacggattaccattcattcaccctgcacccctgctccactgaatgctgggggcagcagaggcagctctggccattggggcagccgcacgactgtsgggggcagtcaggaccgggaagccttgggcagtgtagggtgccgtgaccagggagggtctgcttcttgcaacagcccctttccctttgcacagaaaataatctgaggacaagaacagtggcgtggctggaatggctggggctgctcagggcctctgttgttcagctgggcttgcacctgaggctgacccctggtctctgagacaagctgatggccatcagatgccacaacccctgtctggacaggccccgaggacgtgtgtcaccgcaaggagctcaaagaggatggtggagtgtctgggtcagaggtcaggacccaccttgcatcagcgggcttgggtttagtcatttacctaggaggttgagggtcatcctggcttaagtccagggcatagcacagcaaaatctaccctttgggagttcataaagaacatgcatagttctggcctcgtggcggtcgccagctctcccagggccctgctcttctctgagtgaccactgccctctggtctggtggacgcctgggcatctgtttctatgaaacaacctgtttgtttctgtgtttcaaatatttgtgtttattatggaagagacattattttttcatggaattctgaagactgtcatttttgaaggataagcaggttttggacaatttgcaattcttacaactgtctgtaaatttacattactgttataaatgagaagacccttctgatattcagacaccttgttaaatactggctcgtcattgatgcgtgcagcccagtgtgggctttgtgggggtttgaagtgtgtgtggtttgtagcacacggacattcccctcccaacgcagaggcatctttggcacgagcttcaaccgtaaatccagaaacaagcttgctggctttggacttcatgggccggttaagtaaccccccatagctgaggactgatttaaatgtacttttaattttgtccaacaataaaaaaaaaaataaagcaagcaatagcagacatcgtcacttatgggaagtgcctggggacgacagagtcggcctgaaggatgctgctctcagaggcaggcaatggcccctccgggcacagacgctttggactctgcctgtctccctgagcagcagcagccgtgaccatgtccctgtgtgtggcccttggtcctgtgcatgttcagaccacagcccacagctgtcctcgcgaccccaggcagacactgaccacaggacactgagaggttcaatgcaaggcaggcaccacagcacgaggggctgagtgcaagagctcaggccgtcctctccgagagccccacgctggaagggtgggtgcgggatctgtagggtggggtgtgggatctgtagggtgggtgtggaattgtagggtgggtgtgggatctgtagggtgggtgtgggattgtagggtgggtgtgggatctgtagggtgggtgtgggattgtagggggggtgtgggatctgtagggtgggtgtgggatctgtagggtgggtgtgggatctgtagggtggggtgcgggatctgtagggtggggtgcgggatctgtagggtggggtgtgggatctgtagggtggcaggtcccccaccaggttcttaaggccctgtgttcgcagcctgggccctgaaagccaggtggtgagccaaggccctggtgcccaggccaggagttggtgtctctgagaacccaaagatcgaggagaggctctgagaacccaccgaggaaacagccccatcacacacacacaggaggcaaagccagaagatcagcttaaaatagtttggagacgggaggcggcgcaggtctcagggctgtcctgccactgtgcagcagtgtccttggtaaatcctgatcaacacattgactcgtcagataacgtggacccttctgagtcatttcttggtcttttgacccttcccagtttgggagggggtacgtcacagtcccaagtttttctcgtaaaggggtgtcccccatagaatgcacccttgagatcacatggtcctggagcccctttccagggggttccagaacaatgctatgaaacatttgttcatttgattcgtatttgttgaattcctgctacctaccagtcactctcaagcataacacggagctggttctgcagactacacccgggcatctgggaactggcacccaggagagcacccgacaccgctgagctgggccagcaggtcgttctctctgattccccatcagccttgcaagacctgtcttaggaagaggagtccaagtgagaaaggggcagatcctggagccgggaagggatttgggggagggcccctgacgccctgtgggctgaccgttccccggtgccactcaggagtctcctgtggagccctcacatttgcagtgggatgtgctgtaggtttacgggatcccagcgccagacagagtgagaggaacgggacattcatgctggtgtccgtgggtcccgcctgttgcctctcagacctctcaccgagcttcttgacctgggcttcgcagaccctgggctcttggacctgtgttcaaaggagcatggactctggctgggkttgctaaagcttcagayaactgtccagcgctgagtggagcggaggcaagcccaggggtgctgcccagaggcagcttcctgagaaaatgaagttgctgttgtttaaagccaccgaggttttgcagcaacgggggagtgagcattggtctccaccacgcccggggccgggtcaggccaggacgaagggtgatgtttcctgtgcggatcccgtaggtggagttcaccgtcactgggaggcctcacaatcattgctttattcacctcgacaggtcccatgaggcgagcccccgctcctcccttatttaagcattttaaataacgagtttacaaatttccaacttcaaaatgtgttaaaaaatcttcactcctcccacctcctctcccgtctgctcagtcctgcctcttggaagaggcagccattgtcactggtgtcttaggtgacttcccagaggtcctttagcacatacagttcaatacaaatacatattccctgacttttacaccaacggcaggatgttacatacacttttctccttgttacttaaaaatttttaaattttctttcatttttataatagactttatttttagggcagtgttaggtctacagaaaattgaggggatcgtagagagagttcccacatacccacgtccagtttcttgcactgttaacagtttatgttagaatgatactttgttacaatcaatgaaccagtgttgwcacatgattgttagctaaagtctgaagtttattcacgtctttagtttcccctaaatgtcctttctctgtcccaggacccatccagggtcccacatgacactttgtcccgcgtctccgtaggcctctcggggctgggcagttctcagactggcttttggtgactgggacagttttgaggaggcctgttgggtgtttggtagctgcgtctctgttagaattgttctgatgtgtttctcgtggtaagactggggtttggggcctggggacaatgaccccagaggtgaagtgccctgctcaccccatcctgtgagggactcacacacccagcacggatgcttgctgtggacactggcctcggccacccagctgaggggagtcggtcaggtctccccacggtgatgtgatccttttccttccctctccatactctcgggaaggaagtcagtctacacagcccacacttgagggttgcgtatttatgtttaatttaatattatttattggagatcttttcatatgactacaaaaagaacttcgtgttctgtttcacgcctcatagtattctattgtacgcatctgccgagacatttgaccggtcctctccttgatgtgcatttaggatgtaagtatcattgaagacacatactttttttttttttgagatgcagtctcactctgtagcccaggctggagtgcggtggcgcgatctcggctcactgcaagctccgcctcccgggttcacgccattctcctgcctcagcctcccgagtagctgggactacaggctcacgccaccacgcccggctattttttttgtatttttagtagagatgggttttcaccgtgttagccaggatggtctccatctcctgacctcgtgatccacccgcctcggcctcccaaagtgctgggattacaggcgtgagccaccgcgcccggccgaagacacatacttttaaaaatattatttttacattgatttggtaaattcttagaattgctgggtcagagccagacgcgcttgcaattttgttaagtgcagtgaactctcctccatcgaagtttgtgctgttccgtgctcccgccagcagcaggcgaggctggcctccggcaggttgtcgaaagcttggctttcaccgagcagatgtatgaaaactggtatctcagtgtagttttagtctttaatttaccttttgatgaatcactytgagcatctcttatatgatgaagggtcatttttattcatttttttgtgaacaatttgtttgttgatctgttagatttctttggctataaagattagctctccgtctgaggtaggaattgcttgtatgttttccccgtgtcatttgtctttcaactttgttttgttgtaggtgttttggccatgaaaaaaatatttcgggyaaaaacttttcatctgttctccagcttctgggctttgtggcggggtatggaagggcttccccaggctgggtcatgggggccccatgctctctgtgctcttgtggttttgctccctagcattcacactgtggccctgtagggtcctgctggtggctggggtgaggtgtgcatgtaactgaaggtggtcacctagtgtttgaatatcgttactaataattcgtcttttcaccactgacttgaggtgccrcctttgtcacatgctagcagctcatacacggatttaggtttttttctgaactctattctgtccgtgagtctggctaggcaggtgccaggaagtagttaataccttgtgcctgttttgcagacaggaacactgagatagaggcaatatcttgcccgcggcctgacagacagtaagtagggtggcaccaagcttcagaccccagggtcccatcaggcgccccactcctcctgcccctgtgttatcatcagggctccttcttcctctcattggtcatcgtcaggaatgactagaaggcacagcatccctgttgcttatctgtgagctcaaaccaaaaaggcaccaagttatctggggctcacagaggcgccgcatggtaccagtaggccttgatacttatccctggaaggaaccgttttctgttaaggaacttcactagatggttctctcactcgaggtggaagttcgaggcggtcattgtcttctgcttctcccacacccccgccagctgtctggacttgcacatctggggtgctgtttgtccctccttgctgggatttccccacccatcacccacatgtggacgcacagcacctgctccatgccagtcctctcggagaccctcctgaccctgcaggcagagtcgatgtcgctgtctcttgaggaccactggcctcctcatgcagcttcygtgggactgagataaggtgtctgcatgtcttcatctgccagctgagcccagaacaccttgaagccagggctgggctctgtttctcggggtctccaggggtcagaaccgcaggtgactgactacacggggaactgactgaggggcctcatggcttttagactgttttatgaattgcagacatttatttagctcaggacaagctgcatgcatgtccagttttatttaacttctaaatacctggtcttctgtctgagtctgacttctgtgttgctgccaatcaaaggtggctgtgggttgtctggcactggaggtgtctctgtgggaccttcctgactcctcactgccccaattctccccacatccctatgtgcccaacaccctacacccactgaggcccaacctgggcagaattaccaagcaggtgagattggttggccattctccccaaagcaccttttgctgagtctctttcctcacccctgttctcccagctcatggtcagctgaccccttgggtatgttagtgactcatagcttgggtgtttttccttcctgggggtatttgttttctgtcaggagaccctagaacatcaggaagtacccccgccccaccaggttccccagccagccactgatatcggtgaagccgaggccagcacttacgagagcctccaggatctgcagaggaacacacacctccaactgtcaactgtcaactgtgctgaagccacacgtgggggacaggcaacgtgcccatgccctctgctggacttggcactgtgtgcgtgacacccagctcccctcggtgcagcctggcaaatccatctaccctggtgtctgaagtttgcccatggtctttggccaggggctgtggaagggcctccggggactgaaggtcgggacccatttggggtcattgagagtaaatcgacttgttaatggggcatcctcctcaacccactcctcagggccccacatccacgctcaccaactgcacatgcagacccaggaggtgcatgagctgaagtctgtgggccgcagagccgtgggctcggaagaagcacagcccaccatgccrtggatctccacgcgtggctcctctccacgcctgtgggttgctccaaagctgcagcgtcacgcgcagatgccaggtagccgtgatggaggctcgggcacaagctgtattgcaacggctttgtgagtaagacagcggtttgtcttagctgtatctcgttagggagttccatcccagtcatattaaaagcaccatgccgcatggcacagagtgacaacaaattccttcaagataaaggaaccctaaaactgtaagaactcgaaggtctcgtctgcgatgcagtttgtctggggcaggggagggatctgcccggtgtggctctggccgcaggcaggaagctccctggagcccattcactcccagcccccatcctgcacccccaygtcccactctgtgacttgcctgattaaagcgtcagggaattaaagggggaattggagggcagctgcagctacacatgaaatgaacaaggatgcgcttttcctggtgaacgatgcttgctgggtgccctgtcccctaaggacatctgagtcagagccagacaaatgggagaaatttgtctggggattaggagacctttgatgcctcatccctgtggaactacatggagctcattctgcaaatcaccttctcctgcctcctctgaggtgacttaagactccgttctcttctgacctgkgcttcatgggccttccgtggagccccaggccgctggctgcctggggtgaccatgtccacttgtgtcaaccaacacgtgagcctgagaggctggagctcagaatacaccctggggcacggggacaagtcctgggcagtggcgggagctctgtttgtcattttccttcacttcactcagacacacttcagcaagtgtgtctgagccaacatagaaagatggagcagcaattcagaagcatctctcctgaagacagaaggccagtgcccagcttcctgtcactcactcgagagcattgggcacctgctgggggctgcatgagctgccagtgagcagacaggcaacgtcccagtgctccagggatgcgtgttctatctgggcagagacaacagcaaccagcagacaagaaacgccgcagagtgctgtgtgctgggtgccgggtgacgctcagggtggtcgtctgggcatccgtgtcagagtgctgtgtgccgggcgacgctcagggcggccctgcgggcatccgtgtcagagtgctgtgtgccgggcgatgctcagggcggccgtgcgggcatccatgtcagagtgctgtgtgccgggcggagctcagggcggccctgcgggcatccatgtcagagtgctgtgtgccgggcgatgctcagggcggccgtgcgggcatccatgtcagagtgctgtgtgccgggcgacagtcagggcagccgtgcgggcatccgtgtcagagtgctgtgtgccgggcgacgctcagggcggccgtgcgggcatccatgtcagagtgctgtgtgccgggcggagctcagggcggccctgcgggcatctgtgtcagagtgctgtgtgccggacgaagctcagggcggccctgcgggcatccgtgtcagagtgctgtgtgccgggcgacgctcagggcggctgtgcgggcatctgtgtcagagtgctgtgtgccgggcgacgctcagggcggccgtctgggcatccgtgttagcgttctgtgtgccaggcgatgctcagggcggccgtgcgggcatccatgtcagagtgctgtgtgccgggcgacgctcagggcaaccgtgcaggcatccgtgtcagagtgctgtgtgccgggcgacagtcagggcagccgtgcgggcatccgtgtcagagtgctgtgtgccgggcgacgctcagggcaaccgtgcgggcatccgtgtcagagtgctgtgtgccgggcgacgctcagggcggccctgcgggcatccgtgtcagagtgctgtgtgccggacgaagctcagggcggccctgcgggcatccgtgtcagagtgctgtgtgccgggcgatgctcagggcggctgtgcgggcatccgtgtcagagtgctgtgtgccggacgaagctcagggcggccctgcgggcatccatgtcagagtgctgtgtgccgggcgatgctcagggcggctgtgcgggcatccgtgtcagagtgctgtgtgccgggcgacgctcagggcaaccgtgcgggcatccgtgtcagagtgctgtgtgccgggcggagctcagggcggccgtgcgggcatccatgtcagagtgctgtgtgccgggcgacgctcagggcggccgtgcaggcatccatgtcagagtgctgtgtgccgggcgacagtcagggcagccgtgcgggcatccgtgtcagagtgctgtgtgccgggcgatgctcagggcggctgtgcgggcatctgtgtcagagtgctgtgtgccgggcgacgctcagggcggccgtctgggcatccgtgtcagagtgctgtgtgccgggcgactctcagggcggccgtgtgggcatccgtgtcagcgttctgtgtgccgggcgactctcagggcagccgtgcgggcatccgtgtcagagtgctgtgtgccgggcgacagtcagggcagccgtgcgggcatccgtgtcagagtgctgtgtgccgggcgactctcagggcggccgtgtgggcatccgtgtcagagtgctgtgtgccgggcaacgctcagggcggccgtgtgggcatccgtgtcagagtgctgtgtgccgggcgacgctcagggcggctgtgtgagcatccgtgtcaggtgggctgctggatgctggggggtcactgactcacccctagggctgagggcgggtgggttactggcctccacatgggtgtgacaacctggcagtgagggatggtcatgcagacatgtgttgggcatggagcatccgtggtggtggaagccctcccatgccgggccgcggggcagggctctgggagaggacgcaggatccctccctgcatgtctgtctgcagatcagcttcacctgcccccaccctggcagttcaatctactgtcattagacccacctgccctcaccctggcctgcacccttcaatctactgttattagacccacggggtttcttggtgattaaacgtgtgtgttgctctctgcacatccaagaactgcagaaagaggtttttctcattcctgtgatagatgaaagtgcaatttttaaaaacagtgaaactattcctgcacaagagaactgtgactggattctgccagggaggagctgtgaccagcagggcagagacatgggagggaagagccggcgtcacctccaggcctcctgcgcccgagaggagggaagagccggtgtcacctccaggcctcctgcacccgaggggaggaagagccggcgtcactggccacaggtgaggaggagactgggttgcccaagtagggtatgcaggtccattcaaacgcacccagggatgactcatccccgccagctgctctggcaaggccgggggtctcagagctgggggctgcagcaagcacaccagctctctgctcccgagagatcgtccacaggccccatcaagatccctggtcaccataaaatttaacttcataacttattgataataaattataaacaaaagcctcctaatttacacgcttgttgactactgagtgcttggtgcagtgagtacggctgctgctgtaccaaaaaccacacagatgagaatcactgtataggtgagaactgtgactgcccctgatttctagaggcagcaactgaagctcaggagtgcttgcgactcagctgtctcaggctgcagagccctcctcgtaaccttgcagagtacaatttcgtcttagtgactcccctgtattccagctcttccccggtggaacaggtcaccccatcaacacacgcttcattaatacccgggggaaggtcctgagggactgaatggattatgaaggaaaaacaagcaggaaagcgaaaggggaagagaccaggcagaggacgccccagcactaaagtgaaagatccctgatgggcaggggcggcgcgaccgggctcccaagaccgggtcctgatctgggttttcgtgtagcatggtcacgtgtggagaccggggctccggggctgtgggctgggctgacgctgccatgcgtgggggaaagggtggcaaattgtggccttggcctcttctgaactttccagttcagttacttttcaaaaaggtgcttagccttccttttcaggccaactttagtgtgacctcttcatcttgggacgcggtgggtggcttgttacgggggcaggtgtcacaaggagggagatggtctgtttctttcagtcagggggtggaggaaaaggacttcaacctcttctcagaacaaatgttctcttaacgttgcgcctcatgccagttcactgttttaataataaaaaaaagctaaaaccattgaaagaaaaataagtaaacacataaagaaccgaaggccctgagcgctgaaggatgtgtaaggacccccggggctcttcgaggggtttctggggattgtgggtgtcctgggaactaagatgcctactctcggagtgggggaaggaaggatacagctttctgtcccagattccaaagactgaggaacaactgggttgtgcccactcagagagatgcagggagaccatgcccgtccatccacccactcatgcttgtcgggcaccagccacatgcacggtgctggggcagccggatgtgtccgttggagcctgaccccagcgtctcctgttagtgcatctcattgtagagacgcttcctggacaggcattggcaaggatgagcacctcagtgcagccaggacaagtccttatcacagacatttgcctctgatcatcctgtaaaaagactgtgttcatttttgggggttcctagtcctgggattttgcttccaccttcaggaaatgcacctggtgactctgctgagatcttgctaagaactcctatcgccatgatgaacaccttgtcgtggggacgactctgtgaaaggttccagctctgtctcctgccacagcctctgaactgggatgtgaacctttcggtgtctggccattatcaccctgatggtgaactgggcagccttaaatttcaatattgaagggtcaatcactggaaactatatagacaagtagacgtcagcataggtaacaattgtgaacctttcggtgtctggccattatcaccctgatggtgaactgggcagccttaaatttcaatattgaagggtcaatcgctggaaactatatagacaagtagacgtcagcataggtaacaatagttccacccttgtctcaggtcattcttgccttgctttaaagaaatacttgaggctgggtaatttataaagaaaagaggtttaattggctcacggttctgcaggctttataggcaccatggtgccagcaactgtacagcttccggggaggcctccagaagcttacagtctgggcagaaggtgaaggaggagaaagagagagcaggaggtgctagccacataaaacagccaggtctctgagaactcagcctcttgaggacagcacaaggtgctgctaaaccattcatgagaaatccacccccatgatccagtcgcctccaccagaccctgccttcaatactggggattacaattcaacatgagatttgggcagggacaaaaacgccaattatatcaccccttgaggcccttgttttctgtttaattatcttgaagattcagggactcttaaggcacgacaggatcttagaaacccaaccttttccttttgaacacgaggaaactgaagtctggaataaagtggctcgtctgagtttcagcagcaggttctaacaagctctattctgttcttccaggatggcactctctacctcacctcatgaccgtggtccttgaatcccaagttttcagaagactcagatagagaggggctgctcaaagctctgggctggaacccagaatggcagccgtggactgggtgggaaatttacagcagtttgcagatgtagaccccaccctgctcctcaggacttcaacacacccacccagcctatgcaggcttatgagctgtgaagaaattacatcaagattagatgtcttctcagctgatttttttaatttttaattttgttttaattacattaaaatttttaatttttttattttatagagacagggtctcactatatggcccagggtggtcttgaattcctgggctcaaacagtcttcccactttggcctcccaaagtgctgaggttacaggtatgagccacgatgcctggcctcagctgaattttaagtccattgttattcaagtttttctaacttaattttatgagcttattaattagttcaatatgaaagtctgctgcagacaatctagagcatttctataccccactttattttatgaatacagatgcattgcttccaaatgagatattcgaaaataaaattcagtcctgtatcaaaaatagaatacactgtattcatgtttgttgtgtgacaaattgccctaaaccttagtgggttaaacagtagatggttatctcctggtatctgtgggtcaggaatcgtggcatgagctctgcagtgtagggtctccctcaaggctgtcaggaatcagctgagactgcagtcatctcaaggctcaactggggcagaagttgcttacgagctcgctcagtggcttggcaggggttgttggggttccccaaggctgttctcctgagggccgcgggtcccgactggctgtttgctggaggcttctcctgagggccgcgggtcctcactggctgttctcctgagggccgcgggtcctggctggctgttctcctgagggccgcgggtcctggctggctgttctcctgagggccgcgggtcctggctggctgttctcctgagggccgcgggtcctggctggctgttctcctgagggccgcgggtcctggctggctgttctcctgagggccgcgggtcctggctggctgcctgagggccgtgggtcctggctggctgtttgctggaggcttcgcctgagggccgcgggtcctggctggctgttcgcctgagggccgcgggtcctgactggctgtttgctggaggcttctcctgagggccgcgggtcctcactggctgttctcctgagggccacgggtcctggctggctgttctcctgagggccgtgggtcctggctggctgtttgctggaggcttctcctgagggccgcgggtcctcactggctgttctcctgagggccacgggtcctggctggctgttctcctgagggccgcgggtcctggctggctgttctcctgagggccgcgggtcctggctggctgttctcctgagggccgtgggtcctggctggctgtttgctggaggcttcgcctgagggccgcgggccctcgctggctgtttgctggaggctctcctgagggtggctcacagcacagcagcaggcttcatcaacatgaaagggcggaagaggctgagactgagagtgtgtacctgtaagcaggagagagtctaggatggaagtctcagtcttttataacctaatctcagaagtgacattcatcacttttgttataatctatttgttagaagcaagtcactaggctcagcccacgcacaaggggagagaacaaaagggagtgaataccaggaggtgggatcattaggagccacttcagaagctgccgatcacgtgtactctgatcaagttaggtttattctgggaatgggttagggtggttcaataatggattatcaacaaaagcgtcacatcaataatttgtaaagacttaaatcatcatatcaatatatgttgaaaagacacataatacaacttaacagccattcctaattagaaaaaaaaaaaactctaagtaaaatgggaacagaacgagactacttaaatgtaacaaaaaccaaccaacaaaccccctttcagttaaatttaggagctagacagggatgccttaattactattatttaacattgtgttggagattatagaaaatgcaacataagaaaacaaaacgaaatgtgtggtatacaattggaaaaggaaacataaaactacctcttttgtgctgatgacatgaatgtatatctggaaaacccaagagatactaataacaaactgctaaaattaatgaagaatttggttaggtggctggatacaaaatagctgtataaaaaccaatagcttaaaaacaaaacagtccaacaaacaaagaaatagctttctttcaacaaagatgccaagaacacccaatggggaaaggcagtctgttcaataaatggtgttgagaaaactgtatccatgtatagaagaatgagagtgaacccgtatctcacatctttaccagaatcaacacaaaatggattaaagatgtaactggaagacctgaaactatcaaactactagaagaaaatatagggaaaaggctccatgacattataagggcagtgatttattggatatgaccccaaaggctcaggcaatgaaagcaaaaacagacaaatggaattacatgaaactaaaaagcatcttcaccacaaagaaaacaattaatagagtgaagctgcaacccacagactgagaaaaaatatttgcaaattgtatattgcataaggggctacttttcaaaatatataaagaactcaaattacttaataacaaaaataaaaaccctattaaaagcaagggacttcaatagacatttctcaaaagaagacatacaaatggccaacagatacatgaaaaaatgctcaacatttctaatcattagagaaatgcaagttaaaaccacagtgagatatctcctcatacctgttagattggctatgataaacaagataaaagataagtgttggctaagatgtgaagaaaagggaaccctggtacactgttggtggtattgtaaattagtatagccattttggaaaacagtatggaggttagtaaaaaaaactaaaactagacttatttgattcagcaactctgctactaggtatacacccaaaggaattgaaatcatttgtggaagaggcatctgcgttcccatgttcattgccatgttattcacaatagccaagatatggaaacaaccgaagtgtccatcaacaggtgaacggatttttaaaatgtggtatacatacacaatggaatactatttagccttaaaaaacaggaaattctgtcacttgtaataacatgaatacatctggaggacattaagttaagtgaaataagccaggtatggagagagaaaatactgtatgatcttacttatatgtggaatttttaaaaagtcaaactcatagaagtagagagtagactggtggttaccagaggctgggtggggctgggtatgaggagaatgtggatgaggaaggggagatacttgtcaatggtgcaaagttgcagttagcaggagtgtgttctggtgttctgttgtacggcatggtggccagagttgacaatcatgtattatacatttgcaaatagtaaaagggaggattttaaatgttctcaacacaaagaaatgataaatatttgaggtgatgactatactatttagtgtgatttgatcattccacaatgtatacatgtaccaaaacattacattgaccccataaatatacactattattatttgtcaattaaaaaataaaatcacacctagcttcatcatagtcaaactgccgaaaacaaaatgtaaagagaaaattttgaaagcagccaggggacaatgatagaacaaccactaacttctcctcagagacaatggcggccagaaaacagtggaatgctatgtttaaagtgctgggagaacaaaacaaaaaactgtcaacccggtgttctgtatcaggagaaaatattattcaagaatgaaaacaaaataaaaactgcaagcaatataaatcctaccaatgggagaatggttgaaaaataatagtacatccacgacatagatatgtactattaagctcccattaaaaagcatgagttaggactatgtcagttgacacagaaggggtaaaaaatagttttacaaaaataggatgacaaaatctaatatatttgtctatctttgtgtgtgtgtgtgtgtgtttatatttgagtggcacgccaagggggaaggtgggtcagtctctcccaggtgttgaccataattggataaattgtaaagtgtttaaaaacgatagtaaaaatggctagaagttggcctgctttttgtcatcagcatacattctaaacatgtcagtgatatgatactgtcccctacagtgatggaaggcctctctgttcgctctctaggcaagccactatgtatttgtacgtggtttatataaacatgaagacgagcatggaagggcatacaattggttgttagcccaggtgacctggaaggggttggggttggcatggtggagggaaagttggatcgggaagcaaaaatggaagaggaagcaaaatggacgtcactaaaatcctgaacagtatcatgatataatgatgtatacacagttcccgaagcttacatacatgtgcatataaagggaaattttaaaaagaaaattaaaagaaaaagccccagattcccttctcagaaaaccacaatttcccattgaattctgatgggttagatacccctaaaggtcacgtgtggctccaccccggagttgagcatatctgctgtagaccttggatttgtctggtctacaatgtgatgtcttctaatctgaggaacagttttcccatctgcataagggcacctgcctcacagagcagctttgggtctcgtaaacggacggcacatgtgagtttactgccaggcagtcctcagtctgtgcacgtcacagtccactttggaactcctaagaatgctgtctcctcccaccctagacgtcctcacacagaatctgtgaggggctggcctaggcagaattatcttttaaaaactttgcatatgaggtgcttgataaaagctagttggatttgaatttggccacagctcagataatctggggaactggggtgtctgctaaggatatgtgaccatctgctggtgtaaacctttcagatgatggggaagccgggcatcacggagagctgagaagactcgcttgttcacacttactcgaaagcaggtgcgcctcccaatttctctgtgtttttagaaatctctcattctttcttcagtctccctttccccaccctgcctattttctctctttctctctccacttaatcttttcttttttccttttccttattcctcatcttaacaggtcctaagtgtgtgttgtatgtatttaaaaagttttcgtctctgtttttaattaaaagaagaagagcttactcctgtttccaaacccctgcacgtgatactcaaggagctggtgatggtgcttgctgggcttatgaagtgcagctgtgtcctctcttgctctgtaacaccctctctgccagaaacagctcagcaggaaggcagcggggcaccttggaaacgtgcccctgggccccaccttacagcctctgctccgctcccttcgcggcagagtggttcaggaacagtctgcagcctcctgccaggaggccaggaaaagccactcctggccctgggcagctatgaggctcttggtggatctcagaactctgtgggggccagagggctgagtgagtcaggctgtggagggcaggcaccatccacactcccagacactttgggttatagtctctctcttccttgattagaagaggcctgggaacttcagctggcgactctggtgtttctgactttggctatcagcaaacactgctggaggctctgccccgtccacacccagcttctgtgagcacggaggaggcataatctgcaaagtctgacacaggccatgcctaaccatccttgactggctacctccagtgacataaaactgagaagcaaagacacccaggaggcaaggctgcagtcatttaggagagtggacggatgccagggctgtgctgcctgcagcctttgtggggctcagtgaccagaggagcagcccatgccaagcctagtccccagggatgctgcctgcggtgctcacgcatcttatacagggacacagaggaactctgggctccaccctgcagcctctgctccagcacgcggtggtcccaggagatgtagaaccagcccttcctctgcagttgcactgggtaagtgatgctgtgggctgttatccatcagaaatacaccgcccactgctccaccagtcaaagttacgcctactctggaatttgctctcttagccatttgcttggtttaggaaaagcctaagcttctgcccccccgattcaccacagaagccctctattatcactcctgttacgtgtaaaggctgagttattgctaactctcaacaggtcctagaatcctttatgtgcattcgggggactgggggaggccctggacactgtgccaggtgctgtgtctcaaggttcactggacctgacagggagattgggaacaaaggccctgagagatgtggggagcagcctttgtgtctgagctgtcactcagctctttgctttatgccactggcgtacctgctggaggaactccatgtggaggaaggctgggccctgtggggggcattcgagggggacactctggccagcctcaggctgggtccacctagggggaggaggggacaagccacctcatggatgttgtacacagtggcccaaaagtgaccttaaaaatggatttaaggaataaatccaaatccaaatataagacataagccatctgaagaaacagccttggtgattgtctttgaacctccagactgtggggtgacttgcctcatacaggctgatatggaagtgcttatctcagtaacttcactgtgctctgtctgaagagaagatgtttcgcggctgagtggcccgcattgcatcttataaaagcggagcccagggagaccgaatctggctcgtgtctctagcattgcttgagagtggggacattttggccccagacacaggattctgacctgtgtgggaggcacgtccctgtgttggaggtgggtgcccccagcttctacatattaatgatgtccctgttagggttactttgcccatccccttggcactgattctgttaattttctgattgtaacttaaggattgtggttttggtgtggcatctaagatttcttgtctaatataaggtcacaaagattttttttcctgtattttcttttaaaagttgtggagatttagctattatgtttcagtctgtattagtccattttcacactgctgatatagacatacctgagactgggtaatttataaagagaaagaagtttaatggactcagttctatttggctggggcagcctcacaatcatggtggaaggcaaaaggcacgtcttacatggcagcagacaagagagagctcgttcagggaactcccatgtatcagatcttgtgagacttattcaccgtcgtaagaacagcatgggaaagactcaccctcatgattcagtcaccttccaccaggtccctcccatgacaggttggaactatgggagctacaatttgagatttgggtggggacatgcccaaaccacatcaaggtctatgataccttttgagttattttgtgtgtatggtgtgaggaaaggttctatatccacctttcttgcatctggacatccagttttcccagcattatttgttaaaagactatcattttccccattgaactgccttggtacctttgttgaaaatcagtttactgtaaatgtaaggatttatttctgggctctcagttctgttccattaatctataagtccattcttaataccgtttccacactgtcttgattactgtggctttgtagtaagggttgaaattaggaaatgtaagtcttacaactttgtttttctattccaaattgttttggtattctggatcctttgcagtttcatataaattttaggactgtcttgttattttctgcaaaaagagcctgctgggatttcagcatggatcatattgagtttgcagactgatgtggggagaatagctatttaacaacattgaatccatggacattggctgtctctccatttattcagatcttctttaaagtctctcagcaagttttgtacttgctttgttaaatttaacttaccttttttcacattttgatgctactatgaatagaattattttcttaattttcctactcatggctattatagagctacaattgatggcatgtagaaatatagttgatttttgaaattgtgtatcctgtcatctggctaaacttgtttcttagtttcagttgtacttttggtggatttcttagaattttgtgcaaaaagataactgcaaagagctttacttctctttttagcaatacagatgccttcattttattggttaccttgctgcattggctagaacctcaagtacaatgttgaatagaggtgatgagggtgggcatactgtcctcattcttgatcttagaggaaaacattttaatcaatctttcaccattaggtattatgttagctataggttttacccagatgccctttgtcaaattgaggaattttcttttccatttgtagtttgtggagatattttattatgaaagagtgttggatattttcaaatgctttttctgagtctattgagataatcatgtggtttttgttctttattctgtggttactgtattccattagttaagtattggatgttaaaccaatgtttggatataaatcctcctttgttaatattttgttaaggatttttgtatctatattcatgacagatatggggctgtgctttgcttttcttgtgatgtctttggctaggatgtaaggacaatactgatctcatcaggtgaattgacaggtatttctttcctcctctgttttcttgaacagtttgtaaaggattggtattatttcttttgttaatatttgctagaattcaccaatgaagccatctggcttttccttataggatgattttaattattcaatgtctttactatttataagtctattcacatactctgtcttcttgagtcagatttggtaatttgtgtatttcttcgaatttgtccatctcatgtaagatgtctaatttactggcataaagttgttaatattattgttttataacccttttaacatgtgcaggatccatagtgattctcccttcttggttttagtctctcctggttttagtcacttgtgccccatctttttaccccactgtaaaaggacgggaggggtaaacagatttttatttcacatcccagccctcgccctgggccctgttgtttgacccccagcatcccctgtggttgctcatctgactcaggcttcccagtcacacgtgatgacatggtgacccccgcagcacagtggctagcactagaaaggggctcagtaaatgttagcttcttgtctgtgttcgccttccttgactctgggtctaccaggagtttggcaaactccccccgtggtctggacaggaaagccccaagcatctctctggactggggtgtggtcgtgtcacagaggcatcctccccaccacatacagacaaatgctcagcagtgctgacgtccagatgcttcaacacagggctgccctccaccctgcttcctgcacagaatgaggattggagggggctgcggctggagtgtgggtgacgggatggtcactgttgggggcacgagccgggagttggtgccaggtgagggtgcaggaggggcctgggtcaggagcccgggtacgggccagggccagttgccactcaggtgttctgtgcctttgtcctgtgctggccctgaggcacgctggacgtggggcccagtgcacccttgctgactccagctcctagcatgggagtaagagggccagtcagacctgggaaagggccaccgactggtcctcatagctttgcttttccactttcctgtcccttaaagagccacacagaaaatggtatctgaatcaagtacaatctcattacagatgcgtctggcctggaaacacacccgccaactgtgctgattggctggaaccatgcaggctttggcttttgtgctccttgttaacatttttgttcctatctacactaattagtcataaacagagggacaaaaactccccaaatatgggagatgctaatggcctgttaggaggcctcgcctgcagagctcatctcattccttttgcaagagcagaagttgtgctttagtttagaaacaaggaatgtggatcttgtctgggcattgagttttcgggtactccaagctttcagagctgccgcagaagattttcgggggtcttgctggctctgtgacaagccgccggagtcttgctcagtgctgaaggcacaccccaacatggccatcaccggcaggcctgtccagccctgtcctcatagcttggtgctgtccttgccatagtgagtgagttctcatggatctggttgtgtagaagtgtggcacctccctcccccttgctcccactcctgacatgtgggatgcctgctcccccctcacctcctgccatgactgcaaattcctgaggcctccccagaagcagatgcaggtgccatgcttcctgtacagcctgcagaaccatgagccagttaaaccttttctcttataaattacacagcctcaggtatgtatgcaagagcagcctgacgcagccagccagtgcatcctccaccagggccacctccactcctcaccgcagctgctcctcatggtatctccagcatgagtcagggctccccacaggcccatgtgcgatgatggagctgtgaggagcctcgtggttttccaggctcactctccacgggcctcctggtctcatgtcctgctcagtcctccctcccctggtggagcagcgtctcatgctgggactttctggctccatttcagggtctctccttccctgctggtggcccagctccagagactcagaggaactcagatggggtgcacgggcgtcctctcaggcctgtgcccagggaagtctaggtgtgagccgaacagagcccctgggaccaaatggcccgcgaccgcccccttcaaggaccgtggtggaacccgcttggtgtagctctgtgcccctcaacagactgccacgaaatcctaagaccttgagagcttgggttctgcctcgtttctcctggagctgccttacagaaccattccctttgttctggaatctactttactcccttccttctctcctgtgaactccattgctgtggtttaggacaatccctcctgtagacatcaaggaggatgataagagtatgacacattgtcctcagacagagtgggtgcagcccagctcccaaccccaggctcccaggagcaggggcccccttcaacctgaaggcaacagaagggagtgtttctctcagaacagggaaggtggggatggctgtggctgcacagggacctggtgccatggaggttcagaagatgactttgaagacagtcactgcagccctcaccttgtggcctgggagaccatgtctgggataggccacggtccgcagggatggcctcatccacacagcagcatccgtgcaagtctaggccctttccacactgcattgcttctctcgtattcatttttctataaataatatgtaatcatgttaagaaaatgaaaacagcatgaagtgcatgaaatgtgcagtgcaagctcgtattccctcccgccatcctcagtctggctttctttttccgtttttctttttgttttgttttgttttttaaacaggatcgcagcctgccacccaggttggagtgcagtggtgcaatcagctcactgtagcctcgacctcctgggctcaagtgatcctcccatctcagcttcccgggtaggtaggactacaggtgcactccctcatgtctggttaaatttgtttatgttttatttttactttttgcagagacaaggtcttgctgtgttgctcgggctgtgcctgaagcgatcctcctgcctccgcctcccaaagggctgggattacaggcgtgagcccccacacccagctggacgtcaacccagctttttgcacccccatatgcatgtttctctgttggagcttttgtttcttatggcagaatcatcaagtctcctcataatccctgctttctgtggcatgtcttcctaccaaactccttctttccctccccgtggaccttcgtgtgatgctctgtgttgtttcttcaatgaggcctgttcctcggcgcagcccccttcaaagctgtcggtctgccggcctctgcggtcgaggctgagccgctgttctcgccaggacagacgtggtgggtgtgcagctctgggcgtccgagctcccttctgggccggcagtgaaggaagtcgccacagcacactgttgaacttcacacaccaagacagcagccccgaggcgctcacccagcccacagggcgaggagggaaaatacaacgggaacaatcatgtgcagtgtttctggaatctgaaagccgttggcttaagacacaggcttccgtgtgcaaaagttgagctgtgtattttcatgagaccaaagacacatcgacgtcgtcaggcatcgggggctccctgcagctcagtgtgaggttcactgacctgggcccgttctgtgatgattccttgtttacattctgacccggacctccaacattcctcaaattgttgggaaccagggagtgagatcggcacgaagttcaaaccctcccctgctgtctgcacagccaccagccttgttgctggaacatgctggggattttatgcaggaactgcgggtggcagggagacagtgggcagaaggagctggtgaccttggcgaaaacggaacctcaccctcccatgggcagctggggctctgggccctgcagggtcaaggggaggatgcgtctgccgccttcccccacaggcggccaaggaccgtccgcacaccctctaccccagagaaaactcgggtgtaggaagcaggcgactgtgaggtcagctgcgtctctctctggcctgggtcccagggccggagcctctgtcctggtcctgggtgtccccccgctgcccgctttgggctgccctggactcaggcagccctgctggtaaagtgcccgaggaggtgaatgtgctgctgggccggagttctggtcgggaaatctcagtgggaacagaggctgaggacgcacaaagggtcccagcagccagaaaggacggggagcaaggggagcccgggacgggccgtgggagaagacacctggagcgaactcacggggtgacagctgacgctgcctgggggcaggagagggagatggtccagggccccaggcctcaggctcgaaccaggcaggagacccacgcgtgcaagacaggcagatggggcccggtagagaggggtcgcgaactcacggggtgacagcggacgctgtctgggggcaggagagggagatggtccagggcctcaggcttgaaccaggcaggagacccacgcgtgcaacgcaggccgatggggcccggtagagaggggtcgcgaactcacggagtgacagcggacgctgcctgggggcaggagagggagatggtccagggccccaggcctcaggctcgaaccaggcaggagacccacgcgtgcaaggcaggccgatggggcccggtagagaggggtcgctcggggcacagagctcggagcagggcggccgtggggctccgctcacagggagaggcacagggtcgagtgaggaacccttcctgccgcagccaggctggccgtggagatgggccgagaatggggagggcgtccccagcagggcattcggggtcaggaggcgcccgtgggcggcaacaccgtgggctggaggcaccgcgtctggcaaagggaaggccccagtccggcggcttcacggcccaccgcggtgtccgggttgaggcgggggccgcgcgcatcctcggggggggacagtcggccccgggcgaggggctacccctcaggcccccgtccccgaaaggccacgggtgtggggactcgagcctggcctcggatctcaggcttggacggaacctagtgaggacctgacaccgtgggggcggcctgtggtccccgtccgtggccaggcatcccccgttcacccatcagctgcctgagctccgccacctcatggccgggtgctttggcacccgggatacttcactgaaaagagactttttccactgtggccgagaacgagggatttaaaaaacgtcaaagccaaaccccgtctatgagcagctgtcgtgtccgctccgctggcctcgtgcccggccacgccaccatcactttccaaaagtgtcgctgcggaaggctcactgggaggacaaatgtcggccccacccgcagtttctctgttccctattttctcaccacttcttgttaatttggggctgctgcttcctttggcccctgctcaggctctggattctgggcttagtcctgtgggcagttctgtgagcttatgattaaatacctgatattattaaatactcaggagcatgtgtgagagccgctggccctggtgcccgggttacagctgtgtggggacgtcggtgctgcctgcctcctgccccgctggggggagggagcccccccaacctatgctgcaggtgtgacaccatggaggccagcccctggcgccggtgacgtctcggggtgacaggcaggacccccttgtcctgcctccttcccggatgtctgatttggccgggatttgaggctgtgggggccaccgcctcctgaggcacgaggcattcctgtggcaaggggcggcagggagaccttgctgtcaccaccgtggctggtctgtcagtcggggaacttgggaaccccagaatcctgcaggccgaagggaccttgccctcgagagggggtgaggaaacgaggctgagacgacctttgccagtgcccttggggggcgaagcgggatctggccttggcgtctgcccttttcaagggtcctccctgcacgcctggcgcctgtccctccccacagtggggagcaggggagccccactctacgtcccccgtttactgtccccacgcccccttcccagtcgagctgtccatctccttcataagaaaagactcttccacccaagaaactccccagcagctgcctcaggccttcccgtcacggccctcactgctccccaagtaaagtgggggctgtgggtcaggaagggccccagcttgggtccgagtggggtccccgtgggtcccctgcacccctcatgatatgtgtggggtgggaaggggccttccagggcctctgggacccaatccaggaacttgttctcagagagtcaccagccaagtctcctgggcttttctccgctgctcccacagagccctgggcctgggagggtgggaccacccaggaaggggacaattctgggccccgggatgcccccccgctctggggacaaggggatggtttgttaaaatcccactcccgctctgttgtgaaagatgattcttgtcttcctgcaccactcggcctgtcctgaggctgccgccatttcccagtcaagccctgacctccttcacaagaaaaacctctcccagccgagaaactctcagcccccaggagctcaccaagttcccaggcacctgttccagggccccagctcagtacttccatgggagagcaggttagaaagcctggaacatcccagctccacctcccacataccctcagaccctgggtgagagtggggtccctggctctactccctacacaccctcagacctcaggtgacagtggggttcccagctctactcctgacagacccccagacccccagtgacagtggggtccccagctccacctccccatagaccctcagacctcatatgacagggggtccccagctccacctccccatagaccctcagacctcatatgacaggggggtccccagctccacctcccacagatcctcagaccctgggtgacagtggggtccccagctccacctccccatagaccctgagaccccgggtgacagtggggttgttgctggtcccacttcccacagaccctggacctcctcaggaaggcatccggtggttgtattgaccccgggtgtgagagcccacgtgaaacggaagttgagccaaccttccattgttccctcacctggccctgccccagctcagacctgagccagcgggtaggtgcccaccgccagtcccaggcagaggttcctccggtgctcacagcagcccttggccccatcccggctctttctgtttgggaatctggtgagtataaagtggccttgcttgcggtttactttgagtttccctgactgtaagtagaacttgccatcctcacgcatccccgagagtgcctgcctgtgccctccggcggggccacctctcgctttctgagtcacggctccctgtggctcccgacatgaacctcatcagctgtgtgtgctgcagatgtttcctcccagttcatgccctgcctttgcccttgtcttttgtcttctgatggtagatttggacgtaggacgtgcgtcagccttgtctttcacaattttcctcgtttgtatctgaacaaacccttcctggcctcgagtgtgggagatattctcctgtagcttttacttccatcatcttgcccccatcacaagtcctcatccatctggaagcaatttccttgtgtttggttgaagatagggatccagtttcgctttcctaatgtgcgtggccagtccctggcaccgtgcgcaggcctgcacctcacctctgtcgggcccaggccttctctgtgtgccgggctgtttctgggctctgtggtcggctccactggccgcatgcctgtccctgcaccactgcccccacatgccaaccctgtggcttggttgttggtctcagcgtgctcctgggaaactctcctgccttgcccttcagtgactcactcgctccagtaatcaaacacctactgtgtgtcaagaaaagtgtcactgacaaaagcatctgccttcttgaagcccattcaaatgcagttatgtctatgttggagagagacagactttgtgatggaaggttctctggacaatggtaatcgagcatgacagtgagtggcagctgctgtttagatggaattgtcagggaggctcaatgagaagtaggcatctgagcaaaactcaaaggaaaggagagagtgagccatggacgtcctgacaattccacttatgatacttttcctcctccccgaggtcaggatggtccctacctctgccggtcttgcatgttgttttaacgtatgtgagtggaaccccttgttctcatgccgcagcccattgtgtgaataggctacactatacctgtctgttcgattgttgatggctatttgggttgcttagtttatggccattttgaatatgctgccatggctgggtgaacatacgcgtttccgctgggtgtgtatctagggctgtgattgctgagtcagagtgtgtgtctgttcaacttttgtcggtaacgccaaaccgtctttctgagtggttatggattcatgctccaccagaggagagagttcccactgctcctcatccttggcaactcttgattttaccagtagtttaaattttagccacgttggtgggtgtggagtggtgtctcattgaggctaattttcacctccctgataactaaagatactggtccctatttcatgtgtttattggtcattcatacgtcttttgtaaactttctatatattttgctcatttgttgaattgagttgcttataaaaattatgtatttgtttattttttgagatggagtgtccctctgtcgcccaggctggagtgcaatggtgcgatctcggctcgctgcaacctccgcctctcgggttcaggcgattctcgtgcctcagcctcccgagtagctgggattacaggcaataaaaattattttgaattgcaagtgttctgtatatattctgggtacaggtcctttgtccgatacatgtattgcaaatattctcttcagtctgtctttttaaaaattttcttaatagttctttttgaaaaacaaaggcttttaattttgaagtataatttattaacattttcttttcacttgatgatttgtgtcctgctaaaaaacctttgcgaacaccaaagtcacaaagattttctcctatgttgtcttttagtagtttcatggttttaactttaacttttagctccatgatcccttttgactgaatttttacgtatggtatgaggtaagacttgagactgtcctttccacattgaattaccttggcactgtataaaattggctgtatgtatatatacgtatatatacatatatacgtatatatacatatatatacacatatacacatatatacatatatacatatatatacacatatatatattgggctgtgcacagtggctcacgcctataatcccagcactttgggagcctgaggtgggcagatcacctgaggtcaggagttcgagaccagcctgaccaacatggtgtggtggtggacacctgtagtcccagctacttgggaggctggggtaggagaatatatatatatataggtctgtttctggactctctgtgctgttctgtgatctacatgcttatcctaacactagtactctactatttgctgctttattgtatgtattgaaattaagtagtgtaaatcctccaaatttgttctttttcaaaattgttttggctatcccaggtcctttgccttcccatataaattttagaatctgttttagaatcaatttttacaaaaacaaatgcctgctaggattttgatagggattgagtctaatctatagatgaatttgaaagaaaagacatcttaacaatattgagtcttctaagccataaacgtggtatgtctttccattaatttagttcttcttaatttctctcagcaatgttttatagtttttggtatacaggccccacacacattttgttaaatttatccctaagtatatcatgcttctggatgcttttgtaaatatttgtttttgtttgttacttattttcattttccaattgtgctgatatacagaaatacagctaatttttgtatagttttatattccgtgaccttgttaagttcacttactcgttttagtagttttcttagatacatattttaggattgtgtatgaatagaatcatgttacctatgaataaagacagttaacttcttttccaatctgtatgactttcatttcatttcttggtttatggcagtgtctagaccaatctctgccttttttttttttttttttgttttgagacagagtttcgctcttgtcacccaggctggagtgcagtggtgcaatcttggctcactgcaacctccgcctcccgagttcaaacgattctcctaccctcagcctcccaagtagctgggactataggtgtccaccaccacgcccagctaatttttttgtatttttagtagagacagggtcatgttggtcaggctgatcttgaactcctgacctcaggtgatctgcccgcctcagcctcccaaagtgctgggattacaggcatgagccaccgtgcacggcccaatctctctgcgtttttaatgggagtatttggtccattttcatttaatataattactgaaagttgggactgagtcttccatcttattgtttcatttattgtttattcctccttttttcttttccgctttttttttctttgggtatactgagtatttttccgtcttatctcttctgttggctcatcagctatgcctctttctttaatgcttttagtgctttctttagggtttaaggcacgcctctgtaatttaataacatttcctttaaatgctactatactacttgacttataatgtaagactcttcaatagtatgcttccattttctccctgaaatcctttttgctattattgtcatacatctacttctatatgtgttataattctccataataaattgtgattatttttgctttaaagagacacatttatgacaaagacattaaaaatgagaaaaggggcttttgtatttgccacatatttactggtgccagtgttcctcgttactcggaacagacccagttcctctctggaatcattttccttcagcataaagaacacttccatctcttgtcttgtacatctgctggtgacaagtgctctcaatttttgtttgtctgaaaatgctataattttatcacctcatttttgaaagatttttgctgagtcttggattctatgttgactgttgtattttttccccagaaccttctattacaggtgttctgccattgggttctgcctttccttgtttctggtaataactcagcagtatttcttatcgtcgcgtcttgccaaggtctgtttgctgtgattggtcagaccgcatctcctagcctgtggggctctgggcgtcgttcagatgacagctcccactaagtgctctttgcctgcccgcacggggtctcccatatgtgcggcttaatgttcagccaaaggcacaaggggaccaccaggaccaccatgtagatttctggggttctttctccacatggtttttccatctctggtacttcgcccatacttttcaggagccttggcctctctgagctctggcacctgtcttccgagctcagttaaactgttttgctctccttgagctcctctccctgtgctggggccagaaagcgcctccaggaagaacgccgcggtgtcgtagggttcaccttgcttgctgtctttgtctcggagatcacagctctgtctgttgtctattgtcttagaacaaatgtttcctatttttttcctccagtttataatgtttgtggtaggagggatagtctcataccagatactctgttgtagccaaaagtgggagtcttttcttcatgtttcttcatttcacgttactatattccttctcactgagtgtctgttctgcattctgggtaacttatttagatctatcttcaagttcaataattctctttttatttttgcccactctgctgcttagttcatctaagagtttagcattttaattattatacacaccatctctaatcttgtctgaaccactgacactcaattacttgataactcttcagtcatttgcgtctcctagctaactgcttccctaaatccttgcaccctctacccaaaagctacccctcactctgagcaaggacctcaccatctccttgacatccaggaaaaccaaggacattaacatgggacttctctccacagtgttccacaggacttgcactcctggtccccttctccgtatgtctccttctgtccccgaaccttctgccggtgctcctgacactggccctcaggcctcactcctgggtgctcagcccctgtctgagttgattcctctcttcagcttcagaggccttccctgtccctccaagactgcctgagcttctctcctctgtggggcttcccatgcctccggtgtgccttgagtgagacaccccctcatatgtctgctttcacctcaccctaaccagtccctctatctagctcctgctgctggctctgctgctggctctgctctcccccagactgccaacagacccctgcagcttttcacctgtgttatctgtaaactttcttcactctttcttcttctaggaactcttctcacctcggctttcatgactgtcagtgccccgtccactttgctgtggccttttctttctcaatgtgccttgaagtcttcaggttgggggagatgctgcctggggcatgtgggggagggcgggcctaaacggagaagggggctgagcagagacaggaggggtggttgtgagggtggcaggaggctgtgggattgaaggaagggggctggcgtgggctggggcccagggaaggtggtgtggaggaccagaggctcttgactgggaatgccggccatgcagggtctggtgactgacaggtgcgtatctgtgcaggcccaagccagtgctggccagagtggccaaggcgtccccgatcgcaggggcagctctccctgctgtggcccgcagctggacagtggctgagctaggattcagccgaagctgccggtcctgccggaggctttcttctcacatcagggccttacggctgccccaaccctggcccaggtttgtcacggttgtcctgggatcccctgaggtttccctgtttcccctgcctcttctgggcacacagatctcggggggctttcctgagctgtcctaagctccagcctcccagataccaccagcttcagcgtctttttcagacctcagtgacagctgccccacgccaggtgctgaccttaagcaccactgtgcaccagggctgggtccagacacttccaggcctactgtgtatcctccccctccccagtgttgacaaaactgctctccatggttttggcctctgttggaggggttgccccagatttacatgttttgagatggatttgtggctgcagtgttcctctgggtccaggctgtggccccacgcctgggaatcatgtctgacccaagtgtctggtgtcctgtgcctggggcgaggctcacgcccaccgcatcccgccagctcagcaccggaggcccagccctctccccatctcccttcccttctcattgtgattcatcgtctgtttattaaacatgtggatttttgatttgcagtttttggggctgcgaaggcctgatcccaccagctgtttacaatctatcatccagcacaaatggtttccacgtggttgttatgctggcttatgactgggaacagaatcttggtatccaaatattggactttcggcttaaaaatgagtgcagttctcagcattcccatccctgtattgacagcaaatttgcatattctccttgtttgctttgcagctcaaggtcgatgctgtagccaggatgtcattctaaatgggcggcccctgggaaacagaaccaatggccgttgcctcagcgttaaattgggggaccgatcacaggctcctgaggggggtgagggtgctcaggccctggtgccgtccggcaggaacaggcttctccgggcctcggggggacattgctccactcatgactggtacagcccagagagaggcccctttccagagaccctgagttactgtccccagagaacacaatttttttttcccaacagagagatgggcagaggccataaacagatagttcagagctatgagaacccaggtggctaaaaacatgaaaaacatggtctcaccagtaatccaagaaatacaaaacaaaacagtacggccctggcatttgcgaaacaggccctgaacctgcgaggtgtggccaccgagaccgacaggcaccacagcctgggggggcgtcggccagcgtgctccaggaagttcacaccttcgacctgtgtgttccaccctggacgagccatcccagagacaagggagtggacaaaactcagcgcccaaacacgttctcacagcattgttcataatcagggaagttagggcacatttaaatagtcaacatcagagcagtggttaagcaaatcccccagtgcctctcagaatcatataattgttgaaagaatgaatggcggactgtgatgtagcacgtaagtcacatggaggagggggtctgaagatcacggggatgcctgtggccatatcgaaggaagagcatgatgggaaaatccatcagcggctctcaaggacagagcaggggagagtgacttccaggaggggaagaagattccagatgctgatggggtgctggtgagcagtgcacacgcttgtcaaaactcatcaaactgcactaaaggtctgtgctttgtattgtgtataaattatgttctcataaagttgattaaaatctattatgtaaaattatatatagactttccctccatcttaaaatatataggaaaaagacaaaggaaataggttaaaatatcactaatggttcatttggaataatgagatttggagagttggacaatttcttcttcttactttgttttccgtggtaggtttgctcagtggtggcccccgcaaaagaaacgtttgcctcctagcctctgaatttgaatgtcaccatatttgggaaaagggtctttgcagatgtaatcttaataagagatcttaatatgagatcatctgagattacttggtttttagtaagtaacctttaatttttagaacaattttaggttcacagcaaaattggatagaagttacacaggtttctcatatcacacccccacacaggcatacaacctccccttatcaatatttcccatcagagggtacatttgctacagtgaatgaacctacagcgacacagcatcgtgacccaactccgtggtttacatcaggatttactcttggtgttgtccattctaagcgtggacaaatttatcatgacgtgtagccaccgtggtagtgtcacagaacagcctcactgccctgaaaccctctgcgcttcccaggtcacccctccctcccccagctcctggcaaccactgattttatacggtctcagttttgccttttgcaggatgtcatatagttgggatcatacagcacgtagccctttcagattggcttcttagtaatacatttgagtttctttcatggcttgacatctcatttcttttcagcgctgaataacactccactgtctggatgtgccactcacctactgaaggacctctttgttgttcccaagctttggcaattttgagtaaagctcctataaacgtctgtgtgcaggcttctctgtgtacatactttttcggttcatttacctaaataccaaagacagcgattgctggattctatggggagggtatgttccattttggaagagacggccagactgtcttcaatggtgctgcactgtcttgcgttcccagcagccgtgaacgagagctcctgttgctacacatcctggccagcattttgtgttctcaaaacacattctggccactctaatagatgtagagtggtatcattgttttaatttgcaatctctagtggcgtatgacgttgaacatcttttcataggcttacttgccatctatatatcttctttgatgaggtgtctgttttggtctcttgcccattttaaaatcaagttgttcatttttttattgttgagttttgattgttcttcatgtattttggatatcagttctttatcagatgtgtctgtggcttgccttctcattttcttgaaagtgtctttcacagagcagaaatttctaatttcaaagaagcccagcttatcaatcatttcttccatggatcgtgcctttaatgttgtatctaaaaagtcatcaccttacccaaggtcatctaggctttccctgtgttaacttctaagagttttatagttcgcattttacgttaggtctatgatccattttcagttagttttgtgatgggtgtaaagtctgtgtctggatttaatttctgcatgcagatgtccagttgctctatagcctcatttgttgaaaagacaatttttggccacagtatcgtctttgctcccttgccaaagatcagttgacaaaattatgtgagtctatttcaggactttatcctattctgttgctttatttgcctattctcatgtcagtatcttgattatggtgtcttttgcctctctctataaaccttagaatcagtttgtcaatgtctataaattaacttgctgggatttttattgagagtatgttcaatctacagattaatctagaacaactgactcgacaatatgtgagagggtctccaaaaggttcatggaaaatgcatattatgaaaaaatgcgtagatttcaatttcaaaataaactcatactaccttgttataacacatctgaacaggctctagtttgaggcactaagaagaataggacagcagtttcaaaagagcccctatcagggcaacatgaattctgccaactgaatctttgagtttctcaccattaagtaggatgtttgttttagttttttggtagatactctttaacaagttgaaaaaattctcctgtattcctagtttgctgagagtttttaatcacgaataagtgttaggttttgtcaaatgcatttttgcatccatggatatgatgatgagatttttcttctttagcctattgatgtgactaattttcaaatgttgaaccagccttgcatacctggaataaaccctacttttcataatatataattatttttacatattgttgaatttaatttgctaatattttgttgaggatttttacatgtatgctcgagagacatttgtctgtagtaatatctttgtctggttttggtattagggtaatgctggcctcatataatgagttagaaagtattcctgctgtttctacattctgggagatattgtagaggactggcataattttttccttaaatgtttggtagaattcaccaatgaacccatctgggcttggtgctttctgttttggaaggttattaattattgattcaatttctttaatataaacaggcctattcagattatttgtttcttcttgtgtgaattttggcagattgtgtctttcaaggaactgctccattttatctaggttatcaaattggtgggcatagcatttttcaaaatattcctttattattcctttaatgttcatgggatctgtagtgatgtccccctttcatttctgatattagtaatttgtctctctctctttttttcttagcctggcagaggcttaccaattttactcatcttttaaaagaaccagcatttgtttttgttaatattctctataattcctggtttcaattttattgatttctgctctaattttattatttcttttattatggttagtttggatttaacttgctcttctttttctagtttcataaggtggaagcttagacgactgatgttagatcttcttttctaatatttgcattcaatgctgtaaatttctaagcactgctttaactgtttcccataaattttgataagttgtatttttatttttatgtaattaaaaaaactttttagaaacagggtcttgctctgtcacccaggctggagtgcaatggcatgatcatggctcactgcagcttcacactcttgggctcaagtcatcctcttgcctcagtctcctgagcagctggtactacaggcacatacaactgtgcccagttaatttttacatgtttttgtagagatgggggtcttgctgtgttgcccaggctgatctcaaactcctggcctcaaatgatcctcatgcttcagcctcctaaactgctaattcaaaatattttaaaatttatcttgagatttctttttttttttgagacagagtctcactctatcgcccaggctggagtgcagtggcacaatctcagctcactgcaaactccgcctcccaggttcacaccattctcctgcctcaacctcctgagtagctggggctacaggcgcccaccaccgcacctggctaattttttgtatttttagtagagacaggatttcaccgtgttagccaggatggtctcgatctcctgacctcatgatccgcccgcctcggcctcccaaagtgctgggattacaggcgtgagccatcatgcccagctgaaatttcttctttaacccatgtactttttaaagtgttttgtttaatcttcaagtatttgggaattttccagctatctttctgttattgattttgagtttaatctgttgtggttggaaagcaaacgttgtgtgatttctgatttataaatctgttaaaatgtgtttcctggcccagaatgtggtctctcttggtaaatattcaatgcaagcttgagaagaattctcaatctgctgttgttgggtgtagtatttagatgtcaattatgtccagttgattgatggtgttgttgagttcatctgtgtccttattgattttctacctgctggatctgttcatttctgatagagggctgtggaagtctccagctctaatactggattcatctatttctcattgcagtgctgtgatgtttttacctcgtatatatttggcactctgttgttaggcacatacacattaaggattgttacatcttcttggagtgctgattcctttatcacctgtaatacttccctttgtctctgatagctttctttgctctgaagtctgctctgtctgaaattaatatagccactcccactttctttgattagtgttagcatggtatatctttctccatccatttacagcagatcttcaaataacatcattttgttcaacatcattttattttgttataatgataataagttttgtgcattctccccatgtctgtgtgggttttctctaggtattccagttcttcccacaccccaaagatgtgcacactaggagagctggtgtgtctccatggtctcactgtgagtgtgggtgtgtgtgaaatgtgccctgcaatggaaaagagtcctgtccaggattggttcccaccttgcaccctaagctgccgggataggctccagccacctgcaaccctgagctggagtaagtggattgaaaaataaatgaattattagtaaagtattttaaaataacaattcataaactatatgacaatcataaaaatacatgaccacaaataatgtggtacaaaagtgctcatcaagcctgccatgtttgctactgtttgtttttgaattgagtggtggtaggaggtgctcctcagaattttcagtttacaagcatttattccttgatttaacccaccaccactatgaccactgtcattgatgattcctcaaaattgagtaaataattatcttacttgttttaatctttcttaaatgtatgtatatcttacatttatttcaatgtttaatattataagtattttgagcctatatttagaagtttggtgatattgttgtgaccagaaatatgtcacaaaaaacttaactcttgtgtttatcaattagcctataggaaaagtggttttgttatacatcactttactcaaaaagccacagtttccaagaacctaccactgacgtttagtgaagacttactatacttttaatctatccgtgtccttctatgaaagtgggtttcttgtagatgacatatagttgggtattgttttctatctactctgacaatctgtcttttgattgatgtatttacaccattgacatttcagggattattaacataattgggttaatagctgctatattgtttactgctttctatttgttgcccttgatctttgtttctaattttgtcacacgttttctaccttttatggttttagttgaacattttgtattctttcattttctctccattctgagcatatcaactgtacttctttaaaaatttttttgtgtggtttcccttgagtttgcaatatacattatacaataatctgtaagtctactttcaaataacactatacagtttcatgggtggtgcaaatatcttataataacaaaatatttctaattcttaaccctttcttcctgtatcatgactgtcattcacttcatttatatgtgagcatatagatgcacacataattcagttcattgtcgctattattttgcactgttttctgtttgctaaattaaaaaaaagacaaagtttttattttacttcatttattcatgttccagtgctctcccttactttatgtagcttcaagtttctgacctacattattttccttctccttaaataatttcttctaatatttgttgtaaggaagtctattggcaaaaaattccctcaatttttatttgtttgagactttatttttccttcacttttaaaggataatttcgcagggtactgaattctagtttggtgtttttttctctcagcactttaaatatttcactccactctcttcttgcttatacagcctgcctgcctgcctgcctgcctgcctgcctgcctgcctgcctgccttccttccttccttccttccttccttccttccttccttccttccttcctttctttcccttcccttccctccctccctccctccctctctccctctctctctctctcttttctttttctttctttttgaaagcctgttgcacaggctggagtgcagtggtgcacccacagctcatcacagcctagacctccctgggctcaggtgatcctcccacctcagcctcccaagtagctgggactacaagtgctcaccaccacacctggctaatttttgtgttttttgtagagatagagtcctgtcatgttaccctggctgatattgaactcctgggcttaagcatcccacttgcctcagcttcccaaagtgttgggattgtaggcatgagtcaccatgcccagctgcttacacaatttctgaggagaagtcagatgtgattcttatccgtgctcctccacaggtaaggtgattgtttccctctgtctttttttcaagactttatctttgactctaaagtttgaatgtggtacacctaggtggtgtttttggttgtttggagtttttttttttggcatttattctgcttaatcttctcaaagctttctggatttatggtttggtgtctgacattaatttggaaaaattcttggtcattattgcttcaaatttctttcttctccttcttgtattcccatcacacatatgctacaccttttgtagttgtcccagagttattgaatattctgttttttttttttcctttttctccttgcttttcggtttgggaagtttctattgtcatatccttaagctaagaatcatttccacagccatgtatgtctagtcagctaacgaacccatcaaaggcatccttcatatctgttctagtggttttgatctctagcatttcttctttattctttctcagaattttccacatctctgcttacattacccatctgttcttgtcattcctgatctgataatttcaacattcctgccatatctgactctggttctgatgctattccgtcttttcaagctatgtcttttgtcttttagtatgccttgtaattttttgttgaaaggcagacataatgtactgggcaaaagaaactgcagtaaatggccctttagaaatgtagtgatccaagctgggtgtggtggctcacgcctgtaatcccagcactttgggaggcccaggtgggtggatcatgaggtcaagagatcgagaccatcctggctaacatggtgaaaccccgtctctactaaaaatacaaaaaattagccgggcgcggtggcaggcgcctgtagtcccagataattgggaggctgaggtaggagaatggcgtgaacccgggaggcggagcctgcagtgagccgagattgcgccactgcactctccagcctgggtgacagagcgagactccgtctaaaaaaaaaaaaaagaaatgtgttggtccaacatggggccaggagaggcattctctagttctctgaacaggtctcagccttttgaacctgtgtcctggactgtgaacttcactaatgcttttcagtttctatcccccttaaaggttggacaggatgactagaagggcctggggttcggtatttcccttctcccaggtggtctgggctctgataaaacctcaacaggcaaggctgattgaatagtttctgttgggggcagccttgttaagaacagaaggctctggcagactttaaaatgactcctttccccctcccccggctgagagcatgaggggatttctctctgatattcactgtgaggacctggtagggctcctggagataaaatccacaaaggcgtgtttcccataactgggtcccctcgagtttttaactctcaaagttgtccacactgaaccgcaattcatcaacttcatccaggttttcttatgccggcactggttccagtggaggtttctgctcttgggaagctgtgattctctgtatctgtcagtgtttctcttcaatttgccggggggcagcagtttgtcctgtgacctaatttctctgaaagatttaagaagagttgatttttcaatttttttcagctgtttacttgttaggacagagtgacaacttctaagttctacatgtatttttaattttgtgcattagatttttgatttctaaaaatcttaattggctgtttaacaaatctatctgtcattttcatagttttctgttacttgcaggtattttcaagttgatcttttacttctttaaacataatgataactaaaaataatatgtgtctgataattccattttttaagtctttgtggatttttgcttactattttttctgccagttctaactcatggtgccttgtgtctttgtatatgtagttatttttcactgtgagctgctcatgttgcttatacaattattgggggaaattctttgagtttgagatgaatgtgcatcccttcacagactgtatttgcttttcccaagctcctgtagccccatcaatctgaaatctttttaaactaattccacagcctaaagatttttggactcccaaggaacagagtctctgtgcttggaggcggcccgggcagcctggcttgtccagatggagctcacggccggggcctcgcctgtgactcggtgtgggcggggcctcgcctgtgactcggtgtggcccggggcctcgcctgggactcggtgtgggccggggcctcgcctgggacttggtgtgggcagtggccaggatgtgaccatggtgagaccaggccttgccagagcgtggacttggcagacacggctcctcccttgtgtgcggtgggagcttttggtgcgttccttacgttggagccggcatggagaagcagggcggtccctggggaccagctcctcatttgcacccctctttttaattaagtacattgtttatttttggtacctacttgtagcctagtttagggcccaccgcatattctaaagtgatgcacccaatggtgtccagagacagactagcctggagttggatggggggccagtctggggatgcaaaggtctagagaagcccaggccaagggcaggcagagcagggtgggagtgggagcaggaggggatgctgggggcagtggcagcacatgtgtcccaaaccactgcctcctaggtggggtgggacgggccccaacacaccacctggctgtgccccgtgtgggggtcaggggtgcagcgaggagggctgggtgagcagtggggtcagcagtgcggcgaggagggctgggtgagcagtggggtcagcagtgtggcgaggagggctgggtgagcagtggggtgaggggtgcggcgaggagggctgggtgagcagtggggtgaggggtgcggcgaggagggctgggtgagcagtggggtcgggtgcggcgaggagggctgggtcagcagtggggtcagcagtgtggtgaggagggctgggtgagcagtggggtcagcagtgcggcgaggagggctgggtgagcagtggggtcagcagtgtggcgaggagggctgggtgagcagtggggtcagcagtgtggcgaggagggctgggtgagcagtggggtcgggtgcggcgaggagggctgggtcagcagtggggtcagcagtgcggcgaggagggctgggtgagcagtggggtgaggggtgcggcgaggagggctgggtcagcagtggggtgaggggtgcggcgaggagggctgggtgagcagtggggtcgggtgcggcgaggagggctgggtgagcactggggtgaggggtgcggcgaggagggctgggtgagcagtggggtcagcagtgcggcgaggagggctgggtgagcagtggggtgaggggtgcggcgaggagggctgggtgagcagtgtggtcagcagtgtggcgaggagggctgggtgagcagtggggtgaaggggtgcggcgaggagggctgggtgagcagtggggtcgggtgcggcgaggagggctgggtgagcagtggggtcagcagtgcggcgaggagggctgggtgagcagtggggtgaggggtgcggcgaggagggctgggtcagcagtggggtgaggggtgcggcgaggagggctgggtcagcagtggggtcagcagtgcggcgaggagggctgggtcagcagtggggtcaggggtgcggcgaggagggctgggtcagcagtggggtcagcagtgtggcgaggagggctgggtgagcagtggggtgaggggtgtggtgaggagggctgggtcagcagtggggtgaggggtgcggcgaggagggctgggtgagcagtggggtcggggtgcggcgaggagggctgggtcagcagtggggtcagcagtgtggtgaggagggctgggcgagcagtggggtcggggtgcagcgaggagggctgggtcagcagtggggtcggggtgcagcgaggagggctgggtgagcagtgttggcctcttccccgctctgcccagtacctagagtgctgccacgtctggtgaaggactcagtaaatacttggtgaaggatcagatgaagaaggaaaagttgtcagtgctgaggcaggagaagccaacctcagcatctgagcctgagtggtggtggggcagggtcctgcccagagaaaggtgatccccttcccgaggggagggctggcacggtgctcaggagcaagggctgcaggcccacaggacctttgttcatctgacctgtgtccccatgccaggctctgtcccaagcgggctgaggcagatggcctaggcagccgtcggtgaaccctccctggctccagagcctgtgcaggccccgtgggggtcaggctgctgtggggggcttgaggaccctcacttttggcccctggaggccccgacgaggcggcccttgaggttcaactggacagtattcccctgacccctgagcagagtgtggcatcaagaccccgacagtgaggccagtcccaggccgggattcggtgccctcctttaatgtgtgtgcgagtgcccacaggcctcactcagcctagaggaaggtgggcttgcgagctggggcctgtctcatgctttgcctccgtggcattggctgcgcctcactcctgcactgtggcttccatgtgttgaaaggcgagttccataggtgagaacagctccctcccagcacaccaccggcctttgctcgtgtacagtatttacccaatgccggtgaacacgagcagcctccatattcttgcaccaaggctggagaaggacccagcctgcaacacagctcatgaggcatcaggggccaagcacctaccgtcttgatgactgggggatggtgcccaggtctgtctgcccccactgtccagtggatggtgtgggaaggcattgcaggctggctgagcaggttacataacagtgcacacatgggtttactttacttgaaaccctaaaccctctgcaaacagccccctccctaatccctccctgttgactctgtagatgagcccagggtgctgaaagatgcagctgcatgcctctgcagccaggcccagggcctgcaacatccttcagccaaacgtgggtccctggggagcctctgtggcctcgccggtttcgatgaaggccagaggactggctgcacgggttgcctcagctctgcctgcctctctgttcgtgcctctctcctacctggcgggggtgtctctgttggcctcagagatgtcgctggtgctcaccctggtcacactgaccactgggcatcctcccaccccctgggccacttctgtctctgcacttggcttccctgcccacggcgtggcacccaaacaaagcccacagagaggctggcgccctcctcagccagatgcctgcatttaatagaagatgcagagacacaatctaagccaaaggaatgaatctctagtggtgaaatagcatctggtaagaggagagatttctgaaaggaggcccctttctccttctcgcccctccttgctctggaggctgagtccagctgctcctcccatgcccctgcccagagggcaacgtgcaccagggcctgagagcacagacaggtctaggtgggatccgtgtcagcaccgcagggcacacgagcgactcggcaggctccagagtttggctcattttctgcttggtccctttttgatgcctgtgatttatttataacaatagtttgcataattccaaatgtggtgacacagcatgcagacgctgagtgaaatgaagacagaacagatttttcagaggggtagtggtgtggagcaggctgggccgcgagtgatagaactgagccccaggttgtgctcggagtctcctggtgccagaacactgggcttccgtgggacctgaggggctgaaacggtgctggacctggacccttcctcacagtcaccctcaggtagcccatctcagacaggaggggaccccttgtcccccatccccatgttcggagcgtgctgagctgcacacagtcctccctgggtctgagaccgctggtcctgcccccaccccagctctctcccctctgggtcttgggtttcagctgtgatgtcatcctgcttgcctggagtccagaggggttagctggggggctcttgtttgcccagaattccttgtggctgtccagtctcagtgcccactgtgatgcctgaccctccgtgagagccagcactcaggtcagagatcgtaacctcccgagtgctgagtgtctccggcgctgcccaagctcagggcatgtttgtgtctcagttcagggcatgtttatgaattgacaaatgaagttttggaagaggacaagttcacatacacttgaccaccgagagatagagggagggtttcacatagctctctaccatgggggggagcggttttcccctggggcctagtgtgtggccctgtccaagctcacccagcctccccttgagggagcaccatagattccggatgctcagaccatgttggaagctcaggcctttggaacacctcagatcctactccagcctttctagaagctggggtttaatatatcttagcagatgggaatgtcctgtcactcagagaaaaggctgggcaaggtctctctggggatgaaaccacttagcgctcttcttttgggggatttaagcgcaaatgattcagaaacagtcaggcttcatttcttgacacggggctggaggaggtgagaagggcattgaccaaatgaaatttgggtttggtccaagtcagaaatgtgtgagatgaatggggacaggtttcccgagcccatttaggtctgtgcacggttaccaacagcagcagcagcagcggaggctggggcaccagggtggggctcctgaatgggacatgaagaagggttaccccttctgccataagcaacaggcagggcagattttacaaacgcgttttctagcattgtttctttcagcccaaaagagttctgtgagttcatcttcagaaatcaagtttctgagaggtggggacatccaaggacactggagattgggatgtccgggaaaacggggtcttcaggcccgatctctgcccaccttccatgccctttccccagcctgcccctccagggtgcagcctccccatgccgacgaggttccctggcacaagcaggctggtgtgcatgtctgtgctttggctgcaggagctgcagagagggtgatgtcaggtccatgttgtgtagagagaattccgacatcgcccagcaggtgctcgggtgccgtgtccagcagcttggtgggcttcctcagcccctcagacccccaaaaccattttctttttttgcatccatcaatgtcccgcacaggagcaggcccctcccaggtgaggtgggcttggatgcaggagggaagtggtaaagacccctcccagagacaatgcagaattggcctacacgggtggggcattggaagccagctctgggggtactgactcaggaagatgtgcctcagctgagccccgggcattaggaattggctgcaggcatggacagtggacacggagcagggaggcccaacgctacctgcctacaggggagcctgggacgtgggcttctgttccgcagcctgcagagcctgctggagccgggctggtgtcgaggaccacctggcgcccagcaggtccccctgcagcttgttttctgggaaagcaatggactgaatgcctgtgtccccccaaattcatgtgttgaaatcaaccctcaaggtgatggcatttgggggtgcagcctttaggaggtgatggggtcatgagggcggaggctcatgaacggggttactgcccttacagaagaggcctaagggatgcccctctcttcctccacatgacacagtgagaaggtggctgtctgcaagccaggaagagggccctcaccagaacccaactcagctggtaccgtctgcagcttccaaactccagaactgtgagaaataaatgtgtgttgttattaaatcgtcttggtgttttgctagagaagccctagctaaggcaccttccgttctcccacctcttcctcctggggcaaggcctgggtgaggccccataagccagcgagtggcttcaagctggtggcacagccagtttcaagccgtctctggggtacgtggcacacacaagagccgggctgtgtaacctgcagcccacggctccacagaggggctgtgccgcccggggacactttctctgcaggtctctggcttcaaccctccttgccgcttgtgtgccgggatgcacttttggggcagctggcagccttttagcctcagctcctctgtggggacagagccaagactgatcgcaaggccaagacctaggagtccaggggaggccctcggctctgtccttcctgccggcccggctcctgctcattccactaacaggcatctccctgatgaaatcctcgagaggttagtcctgtctcggcggcagctgctcagagcaccgggctgtcctctggcccctccgaaagcatggccctgaatcactgggggagcctcaccaggcagagatggctcatccccatggacctgggcccccgggtcccggcccccctggcctggccagcacctgacgctgctgtgaggagcatatggtcaaatctgcacctgctgccggccacaagggaggagcaagtgctgagtgcccctgggccacctgaccaagaggtgtccttgtgtccctcgccccctgccccagacgtgcctctcgggaccttcaggccacggtgctatttattacccacttgaggacaaactcggagccaacccacaggcctatgtggcaggactggccacacctgggcccagacacgctgcagctttgcgactccggccacagatcccggggactgactggggttgcaggccttgggccagcccctgaacctggccgtgcctcacagagctttggtggggatgacatgagtggatacattcaaagggtttaaaacggcgcctggcacactgcatccgtgctgctgtgattctatttgagttggtgctttccagatcggtttctctctgtgacgatccagaatctgtgttccgtgcccaggcccaggagtgaggagaggccaacagggaggagaggagggctcctgcctcagggaaacggagcccgtgcaggaggtcctggccgggcagcatggggctcaggacggatgcccgtggcgggtcaccccccacagcagtcacagccggggggcccccaggcctcagggttccacggagcaggttgggcaagtgtgttaggaccatcagcaacctgtgtgcagccaaagacagcaaggacagagccaggaactccggcttctgcctcctctccctgtgccgcctctcctggctgagggctggagagagaaggccacggagcgagagtggcagccctcaagggacgcaggctcagtgctggctgcaggggagctgcgagggcctcaggcgagggagctgcgaggaggccgctgcggcccagtccgtctgttccctgagctgatgacaaaccgtttgttttctgtgaaaggtgctttactgggagaaaggctaacagtgaggcagctctgaagtgcttttattctcagtttcctctgtcgcttaaagaccacttcacatttctttttatttacacggataaggatggatgagcttgatgttctcccaccttcctcttggcgcagctttcttctcctccctcttggaaggactttcgctttttattattattttaaacgttttaaacaacaatctcccaggcgcccaacaaaggcgctactggtgccaggtgcttggcgcctgccttccctgacaacacacgggccacatcctcagcccccccggctggtggcctgtgactcccgccccagtgccagactctttatttcattttgttggcatggtggaaaacactggcttttcaggaggtgaccctgctttcaagagccaacctttggagaaaacaggacacagaagctggttttggctgtgaggccctgacgcacggatgcaggttgcacaggccccatgtcctcctcacagcctgcctttccagctggctcaggagtccctgcggcttgagtttatccagaagcttccctttctcccgcaagagctactcgtggaagagaccagttttaagtgattttgccgcatttgaccttttgggtatttcagtgaaaacaaaacctcttccacaatgcaaaaacttggattcaacaaccatcgattattccctctgggcacctcacagagctggggtgaaggccacctggggttcacgggactcaccgttgggtgttggcattgagtcttgtagagcagggactggcaaagtcagagcacagggcctggtgtgaatcccacctccttccccgactggccaggggacctgcagcaagcgctcagcatctctgagccttagtttcttcctctgcacggggagctcagcggtggcacccacttcatttcagtggtgcccccttagtcatggatgatataaaaatgttgccacaaaagtaaccaagacaggtcgggatgagatatgcacgacttctaaacccaattagggattaattaggaacatacaataaattcccccaattcataagaaaaagacaggaactccggtggatgaatggacagatgatattaataggcaattttcagaggaatttaaagcagcagacagatccatcatacctgccagacaggtgtgcgctgcctggtgtgaccctgctggaggcagtgagggcagcagggatggcagcacctggcggctaggactcggccaagctgaagttcatgcacccgagagccacagcctctgccccagacagggatcagaagtagatttacactcccctctgaaagaacaacaacagagaaaacacacaaagcacatttttcaaaaccctgggcatcggtcgcccgcactccgccaccgtgagtacactgcgtggacccagaaccttgactcctcttgtttctgtgaggctgggacttacgggtgatgtgcagaggggccagagctggtatttagagaggaaatttgggggcaattaaaataggggttctcgacaagtctggcctccctgagcccaggaccaccatagagctctgaacagaggaatgagctggtcgccgtgagaggcggctttgccagagctgggccagggggaaacagcccgttcaatcaggacttggggggtgggactggcttggggttggttggtgtgaggcggggagaaggagatccggaagagtcctcgacggctgacattcacgtcactggagggggccgattggaggggtcagcgatgggctcaattttgtgccctcttgagttcgaggtgtctgtggggcctccagctacagacatttgtgtgttggaaaagctctgcaaaccctgaaacctggggaggcccctggtcttgtctgatggttgtaggtcatggtgacctccactagggcatcttcactcccctgagccacactgagacactgggtttgattgagactctccagccatgatgacaagggttcagctctggtaagccatgtgcagcctccccctcaaagaccagatgccacccacccagggccccaaacatcctggcccagcgggtctgctcactccttgatgagcttaccttcctcgatcaccccaacatgcagagagaaaccctttgcccttcttggagggaggggtcagatgctcactctgcagatccctgaagacaagcagatgctccctgagtggcctgtctgagggattcagctggcagctgggtatcctcatgtgtgcagttcctgagtgagcactggtggtggggaacaggcctggctttccatgcctggggggtgcaggggggatgggcctggctttccacgcctgggggatgcaggggggatgggcctggctttccacgcctggggggtgcaggggggatgggcctggctttccacgcctggggggtgcaggggggatgggcctggctttccacgcctggggggtgcaggggggatgggcctggctttccacgcctggggggtgcaggggggatgggcctggctttccacgcctggggggtgcaggggggatgggcctggctttccacgcctggggggtgcaggggggatgggcctggctttccacgcctggggggtgcaggggggatgggcctggctttccacgcctggggggtgcaggggggatgggcctggctttccacgcctggggggtgcaggggggatgggcctggctttccacgcctggggggtgcaggggggatgggcctggctttccacgcctgggggggtgcaggggggatgggcctggctttccacacccggggggtacagcggggatgggcctgtattccacacctgggggtgtatgtccaccacccagatgccacctctgtgtcattcctggagggcattcgggcatcacctgagggtggggagcagtgccctgacccacatgacccccagcagaagctgccactgtcggccctgggctccgggtgtcagcgtggcgctctgggcttttcccacactggggggccatttcaggatgtggatccctccaggaagggcttgctgagtggctgctgtttgctgggatgggtgaggggtagacaacaggcactcaggagccatggttgggacagaacttatgtttgtcagccaccttggaggggcgacctggagagctcggacaaccttgcagcacccaccagagagcttagcaccaggacccagcggagctctcccacgtgcacacagactcactgctcgtgtgtgagaaggggaataagtgtgactgagccttctggaagttagggcctagcacagagggtcccagatggcccggagaaccaggtcctgtgcagctatccagagaaggtccagtcaccagagacagacagctggagtgccagggccctggaggtatcaattgcctttgttttacatgaagacattgaacttccacaggagggcaaacgccctggctaaagtaactggcggggcagcgtcaggaactcacaagcccctgtggtccgtgcaggctgccgtcgatttgatgagcacagcaggtccaggcagagagacgctcacctccagctgcggttggggtatgtctgggaggcctgtggggtggctttgctcctccaccttgggccagggtagcctgtggcaaagacagtctcacagtgtgtagtctccttgaggtctgggcctgtccgcagacaggaaataatgagaccggctcaggacagggccgggctggcctctgtgttttgtgaaagttcgagtttctacaccctctgagaagatgctgggccctgagggagggtgtggaccagaaggaagtcacggggtgagtggagggggagggaagcttatgtgccattttaagaagacgacagcaaaaacaggaaaatcctatttatctgaatcctatgtgattccacttgaattttcaataatttagacaaaagtaaattggcgtttacttttgcattagccataaggagcagaaggagaaatttgctccctagaatatgagtgttgacgtgttgctgacatcaaaacagaatttaaactttgaggaaagagagatgccagtgctgccacaaaggcaccgacgcccgagacagcagggctcgtgtttcttcacgcagaccatctgtgccgccgttggccatcggaggtgatgaaactgggctgcttccaatgcattccagaatgtaaacccctcaccgtgtttcttcttggtttgatccctggagtgcctgtgctttgtcttcaagtcacacttgggattttgctagttttccaagattatcgcattttttttgaacaaagtaaatcagtttccgacaatgccactgtcgtgttagggtttctcggcgtgtcgcctggctctggccggggttgtgtgtgacgcttcctacccgtgctgccttgcacatttatggagcagggggtttgccggcagcggtcttggttccttataatcctgtcatcgtcctcgtcgtcagccccctccttcccctgctcttcctctgttgtcccagcaagactttcaaagaaccagctattgctcaagtggtcttttagagaatgtgcacacctctcaaccactccacaacacctcaagattgcagtggttgtgtttcgggttcacatacatgtatatcgagactcagggaagtccagggccacacaggaagtggcagagccaagatttagacctgatctagctccaaatcccagcttctctgttgctggccacgcaggatgagctctgtttcccaggcaggctgagcaaatgtccaggatggcaggttcttggcagggccctgggggctgaggccacagaaggcctcctcacaggagtgggggtgaagggccccaggtccaggctggatgaccttctgcccttcctgatgcgggtgacctggctctgctggtttgaagtaaaaacgctgttggcagagaatcgagacgcggggaaggttagttcagggcagggatgttggtgtctgcgggtgatgactgcagcctccctgtgtgttgtgtttcccggttggcacacctctgtttattgtctgcgccagcctcataccccctttccctcagcgtatttccttcataacaggatggcagactcagcggctgctatggggctgttccaactactgaaaacactgagataaggcccacggtggcagaaatccctgaggctgccaagggtgcccacatcccagatgccggggctctgagagtcgcctcctctgttcttagttgcctcggatgtgaacaggcggccatcagggggtgtcatcctgagccctgaggtggggcctggggtctgcactcgaattcacggtgccctgatgctaagttttaattcttaaaaagcttttctagctcaagatactcctcaatatattaattattggctgaaaaaagcctaaatttttaatcttgcaaatgctagaatttctgagctccctatgttttctctcaattctgctgcaagcttggctttcctttctgagcttatctttttcttgaggtactttatcaaatgcagtagcaatgattattcactctagagacattttgcttggaaagcttttcacccaatgccaggattacattgggtatgtttcctgctttctaagttattacaggagcccatgttagtgattttttttttaccattacatgtcacaagttgccattccccgactttctaaagtagtttattcaccacccagtctatcagccagtgccacatattaatactttaggttttattatggcagcacctacttttgacaccaaattctctattggtcagctattgctataataatgctgtgtaacaaatggccccaccaatcccagtggtttagaagaagctgtttgtctctcatgcctatgtcggtgtagtggccgcagcatctacttcaggctgcaggtgcctctcaggtgtgtggcttggctctcattttgagacctgatggaagaggcagaaggtccccccggggcacttcccaggccaggcgtgcaggagggcaagtggaagcacatacttacctgtactcagaactgcccccactgtccccttccacacttcagtggtcacagcaagtcccatttccaatccatggtgctgggactgggagggaaggaaggactgtgagtgtacaatgccacctgccacaggaatggctcaaggatggaggcaaagttaacaccaggagttgccctgtccctctgctcctgaagcccttggctttgcagagatgatgtggtgcagtggaaaggacacagtgcatggcgggccagctcggctgccctgacacactgtggccagctggcctctcctcggtgtccctggagctgcagctttgatgccagggtagaagatgagtgggaggcggaggggcatttccagccaactctatacactgagaagcactaaagattaacaggtgactgtctgggaagagccagctttgtaagagacactgagaggcaccacttcccgggccttcatcttccctctggatgggtggaggaacagggacaccaaacctgacattgctcccatactgagtgccagccatggccccaccttgcacagcccatgcctcaagggggccatggctagcactatctgacaagaggatgctgggcaggtgggtgggagcagaggaccaggtgaaggctggggcctgtgtaccccagttgaagggagctagatttaactccctgagacccaagaagcatccttctggccaccccagtctaattagctaggaatttggtggtggcacaggtgagaaggtccctgctctgtggagcttgcaggttctggaaacaaccccaccacatctgttgcaacacctgcagccgtcttcttgcatctttgctttgtgctggacgcttccatatggaacacctaacacaacatctgtagtgggctgagggtaaccctcaaagatatatgtccacatcctaattcccagaacctgggactgtgaccttatttggaaaaggggtctttgcagatttaattaagtgaagggtattgagttggggagaccattcttgtctatctgggtgggctctagtccactgataagtattcttagaagacagaagaggaggaggccatgtgtccacagaggcagaggctagagtgctgtgggaccacgccccctctggcagctcgtgaggggccacgccccctctggcagctcgtgagggacccacaacagggaggactggggccttgctgggctggagagcccagaggaacaagcagggggctagggcccctgagatgctgtatgactggtccattgttcctgttcctttcccatagaagaaaaaggagagtagtttggggacagattcatgcacatatgcacacatacatactgcacacacatacatactatatacaatacagtgggtatacatatagacacactacagcacatgcacacacacacacattctgcacacaatactgcatgcatgcacatacggcacagcacatacatgcacacatgctgcagcacacacaatactgcacacagagcatacaatcctgcaagtacaccatacacgggtgaagagaaggggcatctgtcagtggcctactcttccagaccctcattttgtcctcacagcagctctctggggtgggcctccccaactccctttaatggatgaagatgctgagacttaagggttacaaagtctgcttgaagtcacaaggtgctgcgacttgagctcagggccaggtgaatccctgatgttcctggcaatctgctcctgaagggtgcagcagggcctctctggtctggttctccctcttcctgtaacctttgaggtagtgcctgcaggaaccctgggacccccccaccccccaccccaatttgcctgctcctgttccctgggctcagcagagtcaccatcccagccccaggacaagtgtcctccttggtgggggacatgtggtcattgctggggcgatacagtgagatgtggccacacagccatgtccagaccttgggcaccatgctgctcatgctccagactgctggggagcacctggtcctggttgtgtctggctttgggtccttcaatttctgctgtctgctttcctgtcattgctcccacttctcaaccctgccttggtagcttctctgatatgatcaggcaagatcttagagcacagttgcatgtttatattatagcttctctatcactcctgtgggtgtgcacatgttgtatggtgtgtgtgtggatgtgtttctctatgagtacagagcacatatgtttgcatgcattctgtgtgtgcacaaggcatgtttaacatatctggtgtatacacagggtatccataaggtttatgtggtatgtgtgcatactgtgtatggtgtacttgcaggattgtatgctctgtgtgcagtattgtgtgtgctgcagcatgtgtgcatgtatgtgctgtgccgtatgtgcatgcatgcagtattgtgtgcagaatgtgtgtgtgtgtgcatgtgctgtagtgtgtctatatgtatacccactgtattgtatatagtatgtatgtgtgtgcagtatgtatgtgtgcatatgtgccatgaatctgtgctctgaaaagaaagccaacacagtggctggacaacattctaccagtcccttgagactatcaaaagtcagtgtgttcagtcacacagaggagcctttgaagacttcagatgaatgactcaggagcccctcagtcatctcagcagaagacagagataggactatgtgaaaggcctagggaggaccttcttgtgaaatagagtgaatcctgtgtgtgacatacacaggagaccacaaagttcttgagaatgttatatcagcagaaacactgccaacttggactgaagggaacagagaaagtatgaaatgaaagatgaaagagcactgttggactctccaaaattctgcaggaaggaagcaggctgataaaaccactcagtggcaaacatgtgctacctttcatgaaaaaggaaggatgactccaagggtggagccatgagcccagatgttggacctgggacccacagaggattattttctcaggccttgaaatctaatgtttgcttagctggtttttcaaagtgcttgggactgaggactccttttttccttccattttctccctttttgaatgagaatgtctataactgtcaactgatgcctgtcctaatgttgggtctgacagcagatcatttgtttcttgagttttgcaggtttacaggtggagcagaattatgcatctggatggattataccctaacccaaccctaatttacattatgaaatttgggacacttgaactaagtaaatttagatgagatttctggactttgacttaatgctgtaatgaggtagatgttcacagatgctggggtggagtggcatccttgtgagtctttggaagccaggggccaactgtagtcagcaggataatggcccccaaagatgtccacatctcactccccactaccttatatgtcaagagggagtttgcaggtgtgattaaattaagggtcttgaggtgggggattatcctggattaaccaggtggccagtgcaatcatgaaagtcctcacaagaaggaagcaacactgttagcatcagagaagatgtaactacggaagcaaaagtcagagtgatgagtttgctttagaggtggagggaggaacccagaggcatggaagataggtaacctctagaagctggaagaggcacggaagtgaattctccccagagcctccagaaagaagagactcttgctgacgccttggtttagtccagtgaaacccatgtgggacttctgatttccaaaaccataagatgataagtgtgtgttgctttaagccactaagtctgtggtcatcggccgtagcagcaataggaagcaaatacaggcatgaacatcaaaagagcaggagacgggcattccggaagtcgcaggaagaacacgctttctactgctcctgttgggtgttgtcgatcagccaagatgagggctgagaactgatgccagggttagcctttgccggtaacatcggcaaaagcacgtttagtggaataggggaggtaaaatctagcttagcgaggactcaggaaagaccaggaagagaggaagtggagaaggaagactgtgttcttagaggggcatcttgaaaaagagcagagagacagccagcagctggggggccctggccggcaggagaggggacagcatgactgttgttgagggtggccccactgagggggcaaccagagctcctggccagcctggagtgggggacggcggtgggtctggctggccaggcacagttgggtgggaagatggtgtggtcggagcacgtggacattcttttctgattgcttctattttctcagtgagatgggaaacaatcatctcctttttgctaaatgtgctgagcaggcttgagggatgcctggacttcagcaggaagcaatagtcatgcctcgcacatgcggctttcaatcctgtttggttggagaaataatataccgcccaactagtttgttttaaattagacaaacaccccggagcctgcctgctgctggagacggctgtgtttggagtggggctctcggcggtgctgaggtcagctctgtttgacattcctgatgtgtgaagggcgcacttaggacaacaccaccaggccacgggcgtgcagctccctggagctgctccaggggccctgcctgagaaatgttccagtccttgaaatttctccccagttttaaacatctgttggtgcttgtggaaaataaggtcgggattgctgtgctcaccgcccgtgaaagctgccattgcacggtctgtaaagtgctggtgatgaacacttcacaccgacaggctgagcctcggccctggccacgtcgctggggcccagcttctgatcagtctgtatggttcagctctccgtggagttaagtcatgacaaccaaggaacacaggcatttgaggggatagctctgttccctccgccatgtcctggggcgagctgtgtagacgtctgttatcttgataaacccaaacctcttggggccaggtgccctgtgccttcctttgtccttctgtccacctggccttccatgagcctctggggtggggctgtctcctttctctcctgacttcccaaagcacaactgaaagcaaactcttccacccaccatgagtctcattccatctctccagtgggcgagacacgtagtgttttgttttatttcatttgctttgttttttcaatcaagctgaggccagcttggaggcctgtttcccttgggatggtggacacatggatctcaggagtttgggggtgccccttctggtcgcaagggaccttctggaccctgtgcctccctcccaccagcctcccctgacaccgcctccgtgctgctcctctcccggtgggctccaccctcactagggcttcgaacctggaatgctctttcctggcctcctgcctgtccccttcccaccaagccccccagttcctgctgagtgccacttcctggctcagctgctcccatccagtgctgggctcagcctcgtcacccacgccccaccataaagggttctttacagcagatggcatcgccgtcggccccccaaccggaggcgcccttcagggcaggagcctgtttcttgtggaagtgtcttaagccctaaaacggtgcccagtgcacagttaaataaaaatcagagccccaagagcaaaccttagcccctcacggtgactacagcccttccaaagaggggccatatcacgtgcacagtgaccctctccacgtgggtcccttggtttgtgagggccttggtttgcaggccatagactgacacagtggcacctggtgtgaggggaagagggtgtggaggccacagacccacacggtggtacctggtgtgagggaaagagggtgtgggggccacagacccacacggtggtacctggtgtgaggggaagagggtgtggaggccacagacccacacggtggcacctggtgtgaggggaagagggtgtggaggccacagacccacacggtggcatctggtgtgagggaagagggtgtggaggccacagacccacacggtggcacctggtgtgaggaccttctgaaggtacccgtgggtgaggggatcatttggatggattgcaaaatggccatgtggctttagtgacacctttaggatgtaataaacttcagagtcaaccttaattctgggagagagacatcttcacttttctggtgccataactgcctctttgtggaacgcaaagcaaaactaaagtcatttttcttgtttgtttttaaggcccttcaggctctagggtgagtttctggtttgaggggaaggcctttcctcctgactccagccctccttgacaaggtctccgtaaagcatgctttctcttagggaccctcagagggaggcttggtggggacatggggtcagggacatcatcaaatgctagacgcccggctggggctgccccgagggctctgagaggagggggcaatcctgcgtggccaggtgggtggtgagtgtgacctgggtggttggcagtggcttccgtccaaggtcctggccaggagcggaatcccacagccacggcaggccattagtggctgagtgaagtttgttcagggtggcctgaccaaaggcaggccctgaggacagctgttgctggctcttggtggaaagaggctgaggccaaagggtttataggtgttcaaattggaaagtggaacaggagacctaagtacgctccctctgaccaggttagggggtactgatggggagtccctcagtagaggcaggggccacctcttctgaccccaagggacccaggccaagaaggagccccctctcccccagggccagggggaccccagcctgccccacactggcactttgcagcaccagggagagaccaggcctcctctgggacaggttccaggcttacgggagctttggtcagaggggcagccacccctgcccactctaagaacgtgaccccagaaaggggcatcatttcttcaacagaagaggaggcgagatgagcttggtgccagttccacggagccacagtgacataaccctccgaacattcgtgaccaaccacggagcacagtgacataaacctccaaacattcatgaccaacctcgattatacagtcacacccagccccgagtggatttaccagagacaggatgttccccaccaggctctcccactaggcagatcctcagcacttggctcaagagtggaacagaccccactagccattgcaggccgttgggcaggcagccctccgacctcagcccatgtgcatatggggtgggggacccgtgggcaaaacttggggtcctaacctgggggggtcaaaccctccacacgcaagtcctggtcagaatcactcagaactgaccctcccctgtgccagcccctcccctgtaccagctcctcccctgtgccagcccctcccctgtaccaagcccctcccctgtaccagctcctcccctgtaccagcccctcccctgtgccagctcctcccctgtgccggcccctcccctgtaccagctcctcccctgtaccagcccctcccctgtaccagcccctcccctgtaccaagcccctcccctgtaccagctcctcccctgtaccagctcctcccctgtaccagcccctcccctgtaccagcccctcccctgtaccacctcctcccctgtgcaaagcccctcccctgtaccagctcctcccctgtaccagctcctcccctgtaccagctcctcccctgtaccagcccctcccctgtaccagcccctcccctgtaccagctcctcccctgtgcaaagcccctccccgtaccagcccctcccctgtaccaagcccctccccagtaccagctcctcccctgtaccagcccctcccctgtaccagctcctcccctgtgcaaagcccctcccctgtcccagctcctcccctgtaccagctcctcccctgtgcaaagcccctcccctgtcccagctcctcccctgtaccagctcctcccctgtgccagcccctcccctgtaccagcccctcccctgtgcaaagcccctcccctgtcccagctcctcccctgtaccagctcctcccctgtaccagctcctcccctgtgccagcccctcccctgtaccagctcctcccctgtacaaagcccctcccctgtcccagctcctcccctgtaccagcccccagaccctgaacagcactggccactacacggagccaccaccctggccctggcctgggtgggtgggggtcccccggggagcacagcgcagtgctagggcccctgtagcagattcccaggagacacacacccagctgggcctgctgacactagccctgcattcccacaccccctcccctggccctctcagctgccttgtcctctcctggtcagctgcctggggacactgtcacgatgcctggcccctgaccttgcccgaagctcctcggtgtctggacattcagcccgacatgctctgaggtttggggcaggtccagcactctgtgggtccaccccatcagccctcagggtgggactcatgcagccacagtttgagagttccaggaaccacaagtcctgagtcagcgggcacctgaccccttatgtcacctgccccaggtggaaggagacgctacagggaccaagcatggttggtaaacgtgtgtgtgtatgtgcactcacgcctgtgtgttaaaatgcttcagagaaagagcagcccaggaacgtgggggttggatgggatgtggaggtgtgggctgtgcctaggggtccctcctggggctgtgtgggtgtgagtggaggactgaggaaaagcctccttacccgggagtgtgtgggggtgctgtttctcgtatactttatttcctgttttaacacatgtgggtgtcctgaaataaaagccgttagccgcccacaagaatgagcaggtttgctggatcacagtcccccacccggtgccaggctgcctgcctgggagactcagggtcctccccaatcctgcctccccacctccacacaagggtgaatctgaagccccaggcacccacgccaggggaactgaggtagagcagacctccagcatccccccgtgacctggcagatggcagtggacattgccctccccagacacccctgtgagttgtcagctctgcctgctggggtggagcccctgacttgggtgagccaagggtggggggagggtggtgaaccagccggccccccaggtttcctgaaccctttctcagtctcctggaaggggctgaggggcctggcaccttcccaccagagcagtggtccccaacccttttgacaccagggacaggttttgtggaagacacttattctgtgggtgttggagagaagaagggatggtttccctctcagatcatcaggcattagattctcataaggagcggacaacctagatcccttgcgtgcagttcacaataggggtcacgctcctgtgagaagtgaatgccgccgctgatccgagaggaggcggagctcagggtcaggccggtccaccgctcacctcctgccgcgcggccggttcctaacagaccacagcctggggacccctgctccagaggacggggagtgtctctctgtcatccccaacgggccagtgatcccgctggaggggctggggctgcacaggacacaggctcagctgtgctgctggccacccatgacccaatcagaggctcaggtcagagggcaaagatgtccactgaagcggctccagaatccctcaaggaaggtgacatccgcttcgcttcctcctccagccccaccttcgcttccgggaccacagagcccctggagcctgcacgccacggagtctcccactgaggagtgaggaggcctcttgtggggacagatctgggtgagtcaggaggccctgcggggctgggctgggctgggcttaggggctggagcggggagggtttctcagactggagtgggagacttgaggtggagatgtgggttaggtcagggtcaaccctgaaagattgagaatcacacggggctgctcaccttgggcgtgaggagcaaggtctctgggactgactaggtgaagaccggtttcctgggacgggcacgacagggacttgagacccgtcttaggctgtgtcagggcagctgagaaacttgctggcttgtgggtcatggagccccaggagccggtcgaggtgcaggagggggcctgggtggggctgagtcaagggctccggccaagcccctgtggcccaggcggtatttgtttatgcctcatggccgggaggagccactgccttcaccacatcccaccggggtggggcgggtaccaccctctgggacagggaaacttcaagtgggaatttgggcaaatttgaactcagctggattttcagtttgttgttctttgaaggaattcaggactgtgtgccagcgctggccacaccaccaggaggcctggcctggcccgagagggatgccagcttggcatctcccacagggcagggcgtgttgggagccgctgttggctgggggctggcctgagcctgactgcctatgtggagctggcaaggagtgaagaccctgctgccagcacagggccgaggctctccggctaaggacaggcttaggacaggcctaggctctggggtcctcagccccctcccagcagggcccggcccatgctgccagacctgggatgtgcccctggacctccctacctcgggcctctgcccaccccagcctcctcccccagacccctcggtctctgcccctggaggaagccgggagtgtttcttttggaaatgaccccagtttgtggttgttctttgtagacacaccccctgctggggatgagaagtccccctggaccttggtttgggcgggaaaccggctgtgtcccacgttaacctaaatcgtcttttcctctttacgttccagagtcatgcttgaggccaggctcgaatcctgcctgcctttggtggctctgagattcagggctgtcttttctgagagcacccaagtgaggtgccttgggatgcccctgacttggagacacagaggaggctgggcaccccttttccccgacgcactgagccaggtcagcagaggtgctggggcctggcatggcccctgggaaagaacctgctttcctcttgtgggaagtcaaatcctcgcactcagtgccggcaccccttggcgggtgacaagagggcatctcgaaggccactgtgctatgggagttacggctttgactctgagacgggggcctgggtgaggacctggtatcctcaaagtccccgtggctgccctgtggagaagactctgttgggagagggcgctgcctcccagaagtgtcccaaggtccaggaaggaatggggggaagaggacaggagggtgttctcacagtcactgtgacctctggtgagcagagggtccttctcaagctactgaatcctcatggggcttgggtgagggagcgaggataggccaggagccagaggctcaggaggggatggcctcactgtggaaggtgcaggggtggtccagcctgagccctctgccccccgctgcagctcagcacccccccccccccacgcacacttacccagggggttgcaaagtgatgggtgttggctctggaactagtcccatgttgtttcccagggaaggagccacacccttctcagacctctgggctgatgcacgaaacggcagccctgcctgggctgcccaccgcccgtcacagaacgatcccgctgcaaatttcacaggcatctggatcgaataacaggctgatagggcgtataaaattagagacagaactctccagaaggcagggtggaggctgcagctccctgggattccacgtgagaaggcagtgatgctgctgcccccacgggaaggacggatgctgagtcagtgggaagacagtgggaagcccagcctggaggggaacgggggacggggtggggggtggtccagaaaaagcagcaggcggttggggtgggacacagggactgtcccgcccggggaggcccccagaccaggagggccagaccctaccgcccctctgcaggaccccatccctgcttcactcccttgctcctagttctgagttgggcccagcctgagtctccaccaggtggacagtagctcctcggggcagctgggtgtgggatctgcaggctcaggcagccacccagatactagcggcctccctgccctccaaaagcccagcctgggatgaaccttgacaaaggccctagaccacagcaaccaccccaccagggctctgagttctccatgaggactggtttccctggaaggtgaacactcaggggctgggacccttaaggattgttcttctcaggtcttcaccgtttccagacgtgtgccttagacatctgcacggacatctcttcccagggatgggcgtctcagggcaggtgcatttaaacttgtgatagagactccaaatcacctctcaaaagcctgttcccattcacacccctgcatacggcatgtcagtggatcccttcctcactggagcaacactagatttagtcataaaatatttttcaatttcttatttctatgattaatagggaggttggatattttgtgatattcattagtttatttgactatgtttctgtttttaccctttaccacttttctagctagtcatttgcttttttcttgttgatttgtgggagttctttatatatgatgaatatcagtactttgtgtttacattgcagatattcgttcccagtctgctgcttattattttacctttttaaggttgttcttttcatcacataaaagtttttaaattttaagtagtcaaatggtttcctttaaggctttggattttgcatttttataccaaaatgctcttgtattttcttccaaactttataattattctttttttttttttttttttttgcctttaagttcattttggggcatggggtgagacagaatagcaccatttttccacattaaatcttagatattgtgagccctggaggacacaaattacagcttagaggcctggagcatgattctggagccaggcttcctgggccggagtccacgtcctgcccatggtggctggccattgctttggggagcctctctgagcctcagtgtcctctttgaaagagtggttgttcagagtaagagggtatcttcctgtggacgactcagcttgcgtctcagcccacagtgagcgaagaaccagggggtctcacagagccctgactcaggtgctgagggtccccctaacctccaggcaattcggcctgcacccccacccccgcttcttcttgcctcttctagaagagaggagggtggcggtaaggctggaagggggaagaaaatctgtttcccaaagcctccaggtgattcagccagagtgagaccaaatggcttgggtcttgggttttcagcttcctcacctgtgcggtgcaggtgacagcaccccacttcctactctgtgggcaggtaacacctgcgtgctctgagaaggggaaaacatctccaccctccccagaggcctgcacggccggaggtcacagtgaggcggccacacgccccgggctcttgctccgaggggacgctgtcccaacaagaggccccctcacagtctgtcctgaccctggctctgtggcccctccttctccttgatcaggcccctcccgggtctaccgggatctctggctgccccccgaccccctgctgcagccccaaccctaggtctccacaaagacttcgggatgccccgtgagcccctgggtcctggacccctcttcctcctccagcccctcctctcccagctgctcctggctgccctttaattgctcagagctgttcagcaacctggcgcgtagctggtacataagtggctgttggttggagtcaagtgagtgatggggagatgctaagaagagtgaaagaagcctcggcacccgccgggagcaggtgctgggggtgtgagtgccgctgaatgaacgcgtcctgggacgggatcctgaagcccaccctcccgccgggcccccacaacccagagcgcacaccaaactttctacgtgtctttcccggtcagcctgagcccaaaccacccatgtccctgagcttgtccttgtctgaaagaggagggaagtgtctgtgtcctcaggagcccctggccttaaagataggcaccctggctctggcaggcaggtggcccctggcagcctcgcccacgcccgcggtgactagctctcgggcaagcgatgcaagtgcagaaaccagctctgtgtggtcagtgccccggagctgcagcggcagcagaggtcggaacaccttcctctgtgggcacgccacggaaatttaaagacacagggtgctctttcgcaaactgggctcgttgattctacaggagaaggtaactattattgagtttcttctttttcagaatgagtggcatccaaacctgactcatatttccaactttattaatttttgcaagacttcggagggtgctctgtggcgattaatattgctgagctgagcacagctgcagtactttcctgtaaaactgactaaaggagaagttggtgtcttcctcatacaagaaatacataaatcagttaaaaatagttctccgagcggatatgatgatgtcgtggccgtcacaggaaacacatgaatcagcctcatcctcagttccagggaagtggggacagtcggtggtccttggacccctcttggggcgcgtgggtgaggcagggtccctctggctttacctcatacccggactggcaaagctgcctgggaggacaactaaaaccatgctcctttgattctgtggacattgctaattgctgggcgttcatttcttgaattcagaccttctcatgaaccagaggagctggctcagaaaaatgccggtgacgcatgggcctgaactggtcagtgcagctcagagatgctcgccgtgggggacgtgcagtttgcctgtgggccagttgtccacccgtcaccgttaccccgctgaggaagctgtgggtgccacccagagagcttgggtacaacacggtctctgctttactcataaaaagccaagacctatgtggtcatggagcgttaaaacagaaatttcacaccacgccgtacggtccccgaggccagggtgttggcacatttcacatccaggaggtgccgtcgctgtcactggctcagcaaagccagtgccgaagccactgcaactgcctgaggcccagcggtggctgggagccaattggtgtcactcggttaccacagggaaggagacgtggctgtagaggcttgtcgcaggtcacagagaagggacttttgggctccaggcctagtgggttcgagtcagcacggtgtcttccccgacaccaaacccaaggaccctcagcacttcctgacctcaggtttctatttctagggtggggagtagaggtgaagggaagcaaagtcagagttgaatataaagctccagaaaaactcagctcagaattgactagagggttgagagcctgagatccctaaggggacatgtcaacccagggcagccgctgagggagactgacatggtttccatggtccttccactgggctggggccctccctggggagtctgtgctgggctggaccttcttccctgccagtggcctctcctggctggttggggagctccgggggagcagacggcaagagtcttgtttggaaacatgcccttcccaggaaatccccaaaacaaaacctgagaagatctcctggaagctcaaaagcaattttcttttcatatgtcgggccaataagagttaatttcacccagtttctatattttcatgggtccttagaagctttctgaccctgtgccctgagacttagggtctgatggctgaaggaaccttggtcccaggtccctctcctgtggaggggccgtcagagggagagaagagctcgccctggttcacttggcctgtcctgaaagagaaccaggagggagagcagcctagcatgggtgcacacaagcatatgtacaaacatgtgctagggcaactcacacacgtccacatgcatgcacatacacacatgcccacacccatgcacacttatgtgtgcacacagattcagactgtacctgtacacttccacacttccacatgcatgcacatacacacatgcccacacccatgcacacttgtgtgtgcacacacagattcagactgtacctgtacacttacttccacatgcatgcacatacatgtccacgcccatgcacacttgtatgtgcttgcacagattcacacgtgtacatgcacacacacattagcatgtccttgcatatgcacacatacacacatctgacttcacattacatacacacatgtacatgcacatacatgacacacatggctcgaactggaggggagggtcccagttgctcccctcgcctgaccatctagtaagtgttgtgccccatgctgccccatcctgggctcctggccaggctctaagattaactagagaggctctgtccctaagaaaggtcatgcacttcagggtaggtaaggtggacaggcaaggcctggtgacctcggcccatccttgtgcctccagaagccgtaactcacctcaaagaggttttcctgctggagggaactatctctgagcaacaggggcagacttcacagctcaggcgccctcctgaaggtaagaggcactgggctcgcctatcaaagacactctcctgtccccgcaggttcccatatgtcccatcagggagctgggctccaaagtctcccgccctgcttctcctagagaatgcaaaggctgcctctcttccctcccagtgtaacctgaccctcctctgtgccccttggccacccttgcatcctctagctccttctgacaccttctttttgactgttcacagagggcaggatctgaagcctgcagaggtgacccttggtgccttgtgcaaggctggccagcaagtaagcatgacttttggctctgctgccagctgggccatttgatctacacacacttttctgcctctacctggagttaggcgaggctctctatagaatgggtacttgtcaacaaagtgggcttagactccgggcagtagcagttgaggcaggagcagtgggagaagtctgggctaatggcaagcacccagtcccctctgtgagctgcccacttgtcccaggctctgccatggcccttcctctgatttttaggagctttcatgaggcctcgcacagcctgaaggagcagagcttgttgtgctaatccccagcatcctctgcagagttctcaacaccttgtggccgaaaggtccttcagattgtccaggcacccaccccgaaaaccagccctggcatgggggtgctgacccctcccggagcagtggggtgcagggctcataaggcggggtctgcaaagcatgctggggtcttgctctgtgcttactccaaggatgcagcccggagtgccactgctcttggactttccttgagacacccagagcattgtgtggccatcacttctcacgtggtctggctgcttggggggctggcctgagtcagctagggccagtgctcaccttatcctaatcacctactgggggattttgtaggcttgaccctccatgccctggtgtttcccacaggctgtgaggttctagggtgtcccagggaggatagacgaggctggtgtcctaggatccctccctgtccgatccaaggtgaggctgccagggaatggaatctggctctcaggcatgggggccaggctcgcctgcagcctcaatgtggctgggccctgaaggccaggggtgggtggggtgcagcccagagctttctgcggctgaatcaccctctgggtacaggaagcctgaccgcatgacttccaaactgatgcaactcggactttctactgaatttgtgagctgtgatactattgcttctgaagtcaaagagggctcagagggttcacggagcattccctttcaatgacgatcggcctctctggaatatctccagtgtcagcagggatggtgtcagggttctcctagcaagaagtcataaggaatggaagggctgagaaaaatgagggttagagtgacaccatgtcagtccccctggctagcctctgccagctggacaagctggggcctcctctccaccttgactggcctgtgccgggggagggagccaagggcaggaccctcttgcacctctaccctgggcctggtccattctcgctcctgggacctccccagagacctccgcagcacaccccaccagcacagtgagcagcacggagagacccagaccgaagtggccatgtgctccatgtgagggctccgtaggaagcaaggatgtacaagtggctccttttcccttcctaggggtcccttgcagggctgggaccccactctaggcgaggcctctgggcaaggatgaccgtccctgcctgcctctgggaaagagtaagttcctgctcctggtgtcagcgccgactggttctccagggaccacggcggaggtctgccctctgtcttactttctcatagagattttccgtgggacctgggctccctgcctggttagggctggttgaagaataagtgggaacggtggaggaaggaaggggatgtgccagctgttgctctggccctttcgtgtggatatgaatccctggtgagaggcagatcctgcggtcagtgcggagcccaccacattcccccaggagggtgtgtccggggctgtgtatggggggaagctgggcaaacagggtcatgccgtgaatgcaggggcaggagcagggacgtttctctctgcagacactggtgctccccaaagcaggagaaatggcacacagccatgttgtggacacatttgtgagaaaattcctctgaatgtcagagaacatggaagagatgaagctaccagcttagagagacacaggaacacatactacagacacacagcacgcacatacccagacacacccagacacactcaccagacacacagactcacacagagaacacaccacgtcacacacagagattcacaaagaaccacatcacacacgttttcacccacagagagaacatacccacatcatacccatgtgctgacacacaagagcataaactcacacacacatacatgaactcacaccgagaacacaggcatcacacacagggactcacgcacagagggcatgtggacactacacacatgttctcacacagcacacgccccgtcacacccatgaactcacaccgagaacacaacatcacacacagggactcacgcacagaggacatgtggacactacacacatgttctcacacagcacacgccccgtcacacccatgaactcacaccgagaacacaacatcacacacagggactcacgcacagaggacatgtggacactacacacatgttctcacacagcacgccccgtcacacccatgaactcacacccagaacacaacatcacacacagggactcacgcacagaggacatgtggacactacacacatgttctcacacagaacacaccccgtcacacccacacccccacatgcgtagacacacacatccttactctgcgcgcatccctggcctggtggacggaagatcgagcgctctgggtggacttacggccacaggacgggggcagagtcggcagggaggcccctccgaggcccagtgggccctgcgctggccccggccgcagacgcccacctgctgtgctggctgcggcgtgtgccccggggtctgtggctgacctggcctccacgtctcacccatgaagcaggcatgagaggctggccaggttggctaaatgggaccacagcagaagcacaagccccagaatgtgcacgaaggaagagagagccgggggaggtggcgggctgggtgtgcagagtgggcctgagctccggcctcctccctggacgccctcccgtggccgcagccatccctgcacccactgatgtggcctgacccctcaccctgagcccacccttcgcggccactagggaacctcaggagaggccgccgcggtggggtgggcggattcccccggagcaggcccaggcccctgcttctgagcgctcctgcagcgccgcctgctggccacagagaacccgcgtgtgccggccgccaggcctgggcatctcctctcctgcagcgccgcctgctggccacagagaacccacgtgcgccggccgccaggcctgggcatctcctctcctgcagcgccgcctgctggccacagagaacccacgtgtgccggccgccaggcctgggcatctcctctcctgcagcgccgcctgctggccacagagaacccacgtgcgccggccgccaggcctgggcatctcccctcctgcagcgccgcctgctggccacagagaacccacgtgtgccggccgccaggcctgggcatctcctctcctgcagcgccgcctgctggccacagagaacccgcgtgcgccggccgccaggcctgggcatctcccctcctgcagcgccgcctgctggccacagagaacccacgtacgccagccgccaggcctgggcatctccccgggccctagttccccccctcacctaaggggagggactcccgtctttccatccaccccctccttgcctctgcagagctccagggaaggctggcacccgctcactgcatttagactccatcaggttcagacagtgggtcagggtacaaggcttcagcggccagggatgtggcctctaatttgtagagagaaagaagggcagaggtaggtaggtagatatatgatagatggttgatagataaaaatagatgaaatagatggcatggttacataggtgggtaggtagatagatgacagatagaaagacaatagaccactgggggctgagcctggcctgagccagaaaggtgagaaggggacagcggtgaggaccccacaggtccctgctctcacctattagccccagtgtttggcctgagctctgactgacagctccctctttccgagatgagactcaagaggaggaagaggggacttcctaaggacagggattcttggtgtctccttggggctggtagacactgcctgcctcgcctgctgtggcctctctgcacacaaccaacgacccctaaagggctccatgggcgcccatgctgcccccatcagctgacaccccctgtgcgaagattctcctcctcctcttcctcctgcctttctgtcccctcatcctcctctttatggaattaacttcccttggtcaacatcttcctgcttcactcacttccctaaactcctccctatcccttctcaatctgcaagaaaaatgtagaaagaatatggtaaaggaaagctttgagcccatatttgggtccaatgccgacaccacatgccccaaagcccccttgagagcatccacgtccgtgtagttgagtattgcccgagctggagtgagatttgcctctctacggagctgccttcctgcagttcaagagcactgtctcttttctgggcctcctgcctggtgcaagggccccagctgagcctcctccagctctgacctctggtggtcccgggctaccccagagggtcttgcccgggctctgacacttggcatgggctgggagctccagcagccacagcccagccctggggaggctttgtggtctctgagggggcaggtgcactcccccaactccagttcatgtttttccctccaactctaagcctttttcttcctctgctattacccaggcaccctaccctgtcaacaacactggccttcaagaccctttgtagcataactcccacctataactcccacctgaagccagcccttcccacctctgcgcctctgatgcccaggacagctctgaccgtgggcagctctgacccaggacagctctgaccttgggcagccctgatctggggcagctctgacctcgagtagctgtgaccctgggcagctctgactctgggtagtcgtgaccctggggagctctcagcatgggggttgcacgctcctgtttagacagctgccgtcccccaagctggctcactatcccatgttggagtgcactgttcggggctgcctgcctggattgatgcagggaaacttggttccagcccacctcctcctgcggaggctgagtcaggggctcttccctcggccaggctgaaaggcagcagttggtccccctgtgaggtcttccacatggcctgggagagtctccccatctcttcaggcagaagggaggacagtccataatgttccttccagtcctctgacttgtcatttttctaccccaaatcttgcactttaaccccatagagagctcctgaagggggaattttaactggcaaaactcagaactccatccaaacacaaccgaaaccatcctgggtggcttagaggtggctgcctcccagacaagtccatagccccacagaaacgtctggtccttcacctgctagagctcaggctttttggttgaagccggagacaggcccagctcagagtgtgccccggtttatcctgagcacagacttggtgcggtgtgtgtgacagaccagcgaagcgggtcttgctgcctgtcctgtggttggcccttggctcccagcctcgagtcctacccttaggccaggtcagagcaggttcagcagcaggactggctaggcaccacccaggctcatgaggtggctttgtggggaggaaatgaggtttttttttttctcttgtaaagttgcttgttgttaatttaaaattttaatttcatttctgaattaacattcagcaaaactgctatttttcggtgtacagttctatgagtttaacacatttatagattcatgtagcaacactgtggatacagaacagttacatcacccccagaactccgttcacagtcacactccccgacccagccccggcagctctccctgtggtttgtcttttgcagaggaaatcccgcagctggcggcacttggagaccggctcctcgccgagccgaccgcgcgtgcgcggctccctcctcgtccgtgctgagcgccgcgtggggttccgcgtggaggcgcctgtgccgctgaagcgtgtttgggttgcttccagggtgggatggttgttggatagagctgtttgtgcatttgcgttgtaggtttttgtgtgaacataagcttttgtttctctcgggtacatacccagaagtgcaattgctgagtcatgtgggaagcgtgtgcccaactttacaggaaaacaccacaggccgccccttcgctttgcgctcccgctaatcgggaatgagtgcctgctgctccgcgttcttgcgggcacccagcattttccgtgcttacatttcagccatcccggaatgaatgaaaagcgtttcctagtggctgtaatttgcatctccctggtggctgatggaagcttatttcccatccatatcccttgcttggtgacgcatctgttcaagtccttccccggtttgtaactggattatttggtgtttttactgttggattttgagagttctttatgtattctagatacaattcctttgccagatatgagattcacaaatattttctccaactgtatgtcttgtgttttcattctctcaacagtgacttttgcagcattcatagggattttatgttttcttctcaaagttttataaaccactatatttaaaattttaatttaaaaactataaacctattatagtttttaaattaaactgtaaacctcttatatagattttctgtttaaacttatgattccttttaagttaattattatgtaagttgtgagggttgggtcaaggcattcctttgcttaaaatccccagcttttcatttctctcagacagaagtcttgacctgcagggtcaggctcccctgctctctgagctcgccctccccacgcagcgctagcccctggactattctcaccactcaggccttggcctccatacccgcttggcacccaccaaagggtccggggacccctccacagggcagcgttctgtctgtgaggtgaagcgggagcagagggccaggcagagccaggctgggacccaatctctgcttcaggctggtcttttttttttttttttttgagacggagtctcgctgtcgcccacgctggagtgcagtggcgcgatctcggctcactgcaagcaccgcctcccgggttcacgccattctcctgcctcagcctcgcgcgtagctgggactacaggtgcctgccaccatgcctggctaattttttgtatttttagtagagacggggtttcaccgtgttagccaggatggtcttgatgtcctgaccttgtgatctgcccgcctcggcctcccaaagtgctgggattacaggcgtgagccaccgcacctggccaggctggtcttttttgccagagttagtgttgtattgagggacatggagggagaaaagggggtcagttaggggcaagtttacttgtgcaggtaaccagggtgagggctcgaggggagaggagagataaggagggcagagctcagccaagttggcctgatgacatgaccagaatgtgatcactagatcccctgcctggaggcccaagtgtggccccaggtctggatagttgcagccactgtggggaagcttcagtttgggagccacagaaaccaagaatattgtctgggaagctgatgtgcagagaggagaatggagcggatggaggtgcggtgggggagagagacaaagagacagagaggagagtaaaagcctgttgctggctccactatgttgggcttgtcagcccagcttcttcttgtcccatccataaaatgggctggtgtcgcccatcctggttaggaggcacaaggaagtattgcgctgtgtgctcggcccagctgactcagcagctctccaacctcggggactctccagacaggtgtgtgcaggtgaggtgctggaccaaggaagggcaggtggaggacatggccgaggggagctctgtgagctgagctgcctgcttcgagggtgcccttgaggcccaggactgacccctggagggagaggcttccttccttctgttggggctcagaaaacaacgccccaaaatgaagtcctcagcagcagcctcagaagcaaaagttgtctctgaccttctcctgccctcctgtctctcagtctcattctccccgaaggcgctgtagaaaccagactctctttttccccaaggccggtcacagaaatcagaaccccttctccccaaagctggtcagaaaacctaaaaatattactcagttttccgtctacctttctatataagagctgactagagagaaatgatccaacatcccttgtttgactgtaggtcatgagactgtcattccagagagggccctgccccacgtccagagaagaaaatgctcagagacgaagacaaatctagacagaccttgctgggttcccactcagtctattcacattagatcaagccctttgtgtccaatcctttttttagaggactgttcatacgttattaaacctaaacataaaaatggacaatttcccccatcgttgggtcttcgttctaaaggttcttatatgtacacatcacataaatttgcataccgtttctcctattaatccatctgtctcatgtcagtgacttctcagcaaacctttaggggccaaggggccccacgctctccagcggcaggcacaatgggcctggggtgcagttgtggacactcggaccctccttggagctggtttagctgtgctgtgtgcttgtgggaatggattgccatgatttctgggctctaataaattgtgcttcaatcgactcttgaggagttaatgagaggcctcacttcagaccataaacaccctccctgtgtgggatagaaacacacatcgtcacagccaggaggtcagtcgggtgagggtctgctttgcttacaaggtccagaaacccagcagaaaaccctcgaggccacatcagtgaagagtaacttatttcagcaacatttccatgtgtgacacaagacacacatttcctgcatccacctttaaagtcaagaagttgaagctgaataaagccagcaggcagcgaaaatcacctgcactcagttcagttgtggcaggaaagggaaagagccatgaagaaaggagagggggatggagagggagaaaggagagggggatggagaggagaaaggagagggggatggagagggagaaaggagagggggatagagaggagaaaggagagggggctagagaggagaaaggagagggagatggagagggggatggagagggggatggagaggagaaaggagacggggatggaggggggatggagagaagaaaggagaggagggtggagagcgacagctgcagagggaggcaggggaggccggcatggacgctgcagaggggacacagccactctgggaacagcagccagtggcggatctgcctggaatgctgttccctcctgtccaggatgggcctgtctctgcagacaggggccctccccttcctggcctggctgtgcactccctatgtgcatggtggaagctctgcagaggccattctgctccagagtggggcatagcctcgggcgaggttcacagcttggggggctggtcctgccctgtcccacatgtggctgtgtgggcagcatggatcttcttccgcggtgaccctgtgtgcccaccccccccaacttatgcctgcttcccaaggccatgggcctcaccctcagacttcacttttgtgtatatggaaagacacaattatcgggacagaaacagatcagtgtttgccagtgggtgagtgaggggagaggagtttactaccgaggggccgaactggggccatttttgagggatgaaagtcttctgtgtggctctacagagctgggtacgtgatgctgtgtttgtcaaaccccacaggactggacctcactgtgggaacaacaagatcaacaagaggagcaagaacaacatcaagagttggggcctgggggtcctgacgggtacaggatgggtacagacccacacaggaatcccagagtgtgttccacagcaggacacgcctgcgctgaaagagtgggcagaaaggagctgacctgggtaagtccaaaaacagtgttttgattagattctggaaagaatcaaataactctgcatatctaagcactaaactccaattggtaaaattgtttcccacagcaatacatgttagcaactttgaaactacttttatatatactaaggtttcacaaataagtcaatacagtagtaagagtcagggttctcacagctggataaggaagtcatggaaaagccagcggggaccctgaggtccatatgtaatatatattatacatatatacagatcagaatggaccctaaggtggtcggttatagacagatatgccagcaggaactcatgtttacatgatacatatatacagatcagaatggaccctgaggaccatatataatatatattatacatatatacagatcagaatggaccctaaggtggtcggttatagacagatatgccagcaggaactcatgtttacatgatacatatatacagatcagaatggaccctgaggtccatatataatatatattatacatatatgcagatcagaatggaccctgaggtccatatataatatatattatacatatatacagatcagaatggaccctgaggtggtcagttatagtcagatatgccagcaggaactcgtgtttacatgatacatatatacagatcagaatggaccctgaggtggtcggttacagtcagatatgccagcaggaactcgtgtttacatgatacttatatacagatcggaatggaccctgaggtggtcagttatagtcagatatgccagtaggaactcgtgtttacatgatacatacatacagatcagaatggaccctgaggtggtcagttatagtcagatatgccagtaggaactcgtgtttacatgatacatatatacagatcagaatggaccttgaggtggtcggttacagtcagatatgccagcaggaactcgtgtttacatgatacttatatacagatcggaatgaaccctgaggtggtcagttatagtcagatatgccagtaggaaatcatgtttacatgatacatatatacagatcagaatggaccctgaggtggtcggttacagtcagatatgccagtaggaagtcgtgtttacatgatacatatatacagatcagaatggaccctgaggtggtcagttatagtcagatatgccagcaggaactcatgtttacataatacatatatacagataggttaaatatatacacacacacgtgcgtgtgcatacatggcttagcacacacatctgtagatcctgggtttgtcctttgagaggggacaccccagtagcagcaagcacattccatgcccagatgttagtttctaaatttcatcttcaataaaaggagccaagtctccctggagaaatggctgataattgggatgtgggagagaaaatacaagatgaacctggagcatcttgtagtcccaggaagtaagaaaatgctcaaaaataaaatttttaaaaagctgtgggcatttcaaaagggcatggaacccaaaatgtaagagctcccagtggccacagctacaatgatttgagtgcacacacactcacacagacatacacacacacacacacaaatcggattatgccccaaagaataaaatgaatgtccatggattcgtaagcatataaataaattattgaataaattaaaactgaaagggtagccgggcgaggtggcgagcgcctgtagtcccagctactcgggaggctgaggcaggagaatggtgtgagcccgggaggtggagcttgcagtgagccaagatcacgccaatgcactccagctggggtgacagagcaagactctgtctcaaaaacaaaacaaaacaaaacaaaacaaaaaactgaaagggacaggcctttcttggaacaaattccaaacaagaaatgtggagtaaatagggaaaatcaccatcaggccgggcacagtggctcgtgcctgtaatctcaacacttcgggaggctgaggcaggtggatcacctgaggtcaggagttcgagaccagcctagccaacattgtgaaaccctgtctctacaaaaaaatacaaaattagctgggcctggtgacacatgcctgtaatctcagctacttgggaggctgaggcaggagaatcgcttgaacccgggaggttgcagtgagctgagattgtgccactgcactccagcctgggcaataagagcaaaactctgtctcaaaaaaaagaaagaaagaaagaaaagaaaagaaaaaaaagaaagtcaccatcagtgctgcaggcaagctcccctgaggaatgctaaaattcctgtgcaaagtttaaggagaaagaagatatttgtatagtctcaaagtgtctcccctaaatgttcagtaattaccgcggcgcccaaattctttgatgctccttcctgtaggagttggagctcatgctggacttcatgactcactcttaaccagcaggacatggagaggaaaacagtcactctcccgtggggagacctggcaggcctcaccttggccgtgtgatcaaggtccagaccaccagtgatgaggcatgttgacatcgtggcccctgagagcacgtgatgagaagagcgctccacctccgccgtgttcttccgcaaacgcacagttccaatgtaatcagagagaacatcacacacacaccaattgaggggcatcttgcagaatacctgagcagtactctgcaaagctgtcaaggcggtgaaacgaagacaggccaggaaagggtcaccggtgcaggggactaaggaggcgtgagggccagtgcagcctggggtcctggacgtgagctgctgagacggcacccgcgtgagtgtcgcagtttccacaccgtgagctgccgagacggcacccgcgtgagtgtcgcagtttccacaccgtgagctgccgagacggcacccgcgtgagtgtcgcagtttccacaccgtgagctgccgagacggcacccgcgtgagtgtcgcagtttccacaccgtgagctgccgagacggcacccgcgtgagtgtcgcagtttccacaccgtgagctgccgagacggcacccgcgtgagtgtcgcagtttccacaccgtgagctgccgagacggcacccgcgtgagtgtcgcagtttccacaccgtgagctgccgagacggcacccgcgtgagtgtcgcagtttccacaccgtgagctgccgagacggcacccgcgtgagtgtcgcagtttccacaccgtgagctgccgagacggcacccgcgtgagtgtcgcagtttccacaccgtgagctgccgagacggcacccgcgtgagtgtcgcagtttccacaccgtgagctgccgagacggcacccgcgtgagtgtcgcagtttccacaccgtgagctgccgagacggcacccgcgtgagtgtcgcagtttccacaccgtgagctgccgagacggcacccgcgtgagtgtcgcagtttccacaccgtgagctgccgagacggcacccgcgtgagtgtcgcagtttccacaccgtgcgctgccgagacggcacccgcgtgagtgtcgcagtttccacaccgtgcgctgccgagacggcacccgcgtgagtgtcgcagtttccacaccgtgcgctgccgagatggcacccgcgtgagtgtcgcagtttccacaccgtgcgctgccgagatggcacccgcgtgagtgtcgcagtttccacaccgtgagctgccgagatggcacccgcgtgagtgtcgcagtttccacaccgtgagctgccgagatggcacccgcgtgagtgtcgcagtttccacaccgtgagctgccgagatggcacccgcgtgagtgtcgcagtttccacaccgtgagctgccgagatggcacccgcgtgagtgtcgcagtttccacaccgtgagctgccgagatggcacccgcgtgagtgtcgcagtttccacaccgtgagctgccgagatggcacccgcgtgagtgtcgcagtttccacaccgtgagctgccgagatggcacccgcgtgagtgtcgcagtttccacaccgtgagctgctgagatggcacccgcgtgagtgtcgcagtttccacaccgtgagctgctgagatggcacccgcgtgagtgtcgcagtttccacaccgtgagctgctgagatggcacccgcgtgagtgtcgcagtttccacaccgtgagctgctgagatggcacccgcgtgagtgtcgcagtttccacaccgtgagctgctgagatggcacccgtgtgagtgtcgcagtttccacaccgtgagctgctgagatggcacccgcgtgagtgtcgcagtttccacaccgtgagctgctgagatggcacccgcgtgagtgtcgcagtttccacaccgtgagctgctgagatggcacccgcgtgagtgtcgcagtttccacaccgtgagctgctgagatggcacccgcgtgagtgtcgcagtttccacaccgtgagctgctgagatggcacccgcgtgagtgtcgcagtttccacaccgtgagctgctgagatggcacccgcgtgagtgtcgcagtttccacaccgtgagctgctgagatggcacccgcgtgagtgtcgcagtttccacaccgtgagctgctgagatggcacccgcgtgagtgtcgcagtttccacaccgtgagctgctgagatggcacccgcgtgagtgtcgcagtttccacaccgtgagctgctgagatggcacccgcgtgagtgtcgcagtttccacaccgtgagctgctgagatggcacccgtgtgagtgtcgcagtttccacaccgtgagctgctgagatggcacccgtgtgagtgtcgcagtttccacaccgtgagctgctgagatggcacccgtgtgagtgtcgcagtttccacaccgtgagctgctgagatggcacccgtgtgagtgtcgcagtttccacaccgtgagctgctgagatggcacccatgtgagtgtcgcagtttctacaccgtgagctgctgagatggcacccatgtgagtgtcgcagtttctacaccgtgagctgctgagatggcacccatgtgagtgtcgcagtttctacaccgtgagctgctgagatggcacccatgtgagtgtcgcagtttctacaccgtgagctgctgagatggcacccatgtgagtgtcgcagtttctacaccgtgagctgctgagatggcacccatgtgagtgtcgcagtttccacaccgtgagctgctgagatggcacccatgtgagtgtcgcagtttccacaccgtgagctgctgagatggcacccatgtgagtgtcgcagtttccacacgtgcctcattgctgtgtaagatgctcaagtgagaggaagctggtgaacgggtctgtgggaagttgcagtactgtctttgcaactcttctggacatcttttttttttttttaaataaaacatttttaacatgaaaatatgcagagcacggtggctcgcacctgtaatcccagcactttgggaggccgaggcaggtggatcatgaggtcaggagttcaagaccagcctagccaacatggtgaaaccccgtctctactaagaatacaaaaattagctgggcgtggtgatgggcatctgtaatcccagctactcgggaggctgaggcaggagaatcacttgaacccgggaggcagaggttgcagtgagccgagatcgcgcccctgcactccagcctgggtgacagagcaagactccatctcaaaaaaaataaaggaaatatgcgtcgttggatgctgtatgacaatcaagctacttataacaaacaaaattgagaatgaaggtaaattaaaaataatttatagtctttaaaaagcaggaactacaaaatttacatttctgaaaatggcagaaaaatcccacatggctgtatatgtatgtgtgagattgtgtatgaatgagcgcatgcatatatttttgtgtgtttggattatatgtgtgacggtgtgcatgagtgtgtatatgatttgggggtatgtgtgagtgtgtatgactgtgtgtatgagtgtgtatgatttgtgtgtgtgagtgtgtacatgtatacactagtgtgcgtatgatttgggggtatgaatgtgaatgtgtacatatgtatttatgatctgagtgtgtatgagtgtgaatgtgaacatgtgtgtgtgagtgggtatatgatttgggtgtgtgcaagtatgaatatgtattgtgtgcattaatgtgtatattttgggctgtgtatgagtgaatgtgaacatgtgtgcacgagtgtatatatgatctgggtgtgtatgagtgagcatgagtgaacatgtgtgcatgaatgtgagtatgatttgggtgtgtatgagtgtgaatgtgtgcacgagtgtatatatgatctgggtgtgtatgagtgagcatgaatgtgaacatgtgtgcatgaatatatgatttgggtgtgtatgagtgtgaatgtgtgcacgagtgtacaatcggtgtgtatgagtgagcatgaatgtgaacatgtgtgcacgagtgtatatatgatctgggtgtgtaggagtgagcatgaatgtgtatgcacaagtgtgtgtatgtgtgtatgatctgggtgtggagtgtgaatacgaacacgtatgcgcaagtatgtatatgatctgtgtatgtatgagtgagtgtgaatgtgtgcataagtgtgtgtatgatctgggtatgagtgattgtgaatgtgagcatgtgtgcacgagtgtgtatatgatctgggtgtgtgggagtgagcatgaatgtgtatgcacaagtgtgtgtttgtgtgtatgatctgggtgtgtaggagtgtgaatatgaacacgtgtgcacaaatgtgtatatgatccgagtatgtaggagtgagtgtgaatgtgaacatgtttgcacgtgtgtatatgatatgggtgcatgtgtgggtgtgtttgtgcaggtgcactgggagctttcagcattgagtctgtgtggcatccaggcttttctggatgatgtagaatcaaaccccataattaattccagtaacttagaaattttcacttatgaatactaaattctcctcacctagcaactgactgagcaggttgaacagcacccttcgccgttctcctgcagaaccccgtggaatggccctgctttctcagagtgctcctagcggtgatgagggagcccagctcattgcggttcgtgcagaaggctgtgtgccatctccgggactgcacggagaggcggaggctcaggcgtgggatctgagctcagtgggccctttaaggaccgctgcctcctttcctccctttggcattcagcatcgacttacgatggctcccagtcacagtccttgtcactgcctggcattacacagggccacagtcccttaactgaaacacttgggaccagttgcattttggaattcggaatgtttcttgatttcagagagagaagaggggatggactgttgggcagccctgattaaccctgcagcgtcttggctctagaggggcctacacggctgggagcgtctcggctctagagaggggcctgcactgccgggagcatctcagctctagagaggggcctgcactgctgggaagcctacacggctgggagcgtctcggctctagagccacagctgatgcatggcaacgatgagctctcctgcttagtgctgatgtgcctcagcccctaaccccactggtgtccagatgaggaacttgaggctcagagaagctaggtcaaggtgaacaccagtgttgagtttcagccccaggtctacctgatgctgactccacattgactgagttggcctggtccattgtgaggtcaggtagagccagggccgaggtggggatgccaaggtcccatgccgcaaagatgggtgggacggcacaggagccggtcatcatccccaaagacacagctccgaatacctcatcctgaaatcccaaagatcaaaatcccaaaagtataaatctggaaaaaataatgtcgatgttatttatttacatttttaaaaggtatgtatttgagaaacataaaaacacaacagaacatttcataggccactttacacaataaaataggcaatgataacaggtatttttgcataaacactgaggtaactaacgacggcggcatgggtgtagcagttataagaagacagaccataaagaaataagtcaaaagagaaacgtgtacacgtatatcgctacggttactaattgtgtgcacctagccctgtagctgtggtcatctgaaatatcagggattttagacttgagggattttgatctttagggatttcaacattccacattatggtgcttgggattgtgtctttcaggattatgatccaaactcagctgggcctcccctccctgccccaggattgtggagtgagaacgttgcagcaggagagaacaacgcagcaaagcacagcaggggaaccggaaatgctcaccttttgacagggtacttttagttctggggccttatcttaaggatattccaacatatacaaaaagattcatgcacagagatatttactttagtattatttaccataggaaaaaagttggaaacaatacattttatgttctgtaaaatgaaagaacagttaaataaatcatggctctaagacgactccagggctgtgtacggaagttcagggacagaatcagttgaggctgttccacctgagcctaagcttcctctgctgtatgtcgggaatcaggtgggggccaagcgagatcaccacagtgcaggccagtgtgcagggcacaggtgggcgccagggaggggacgccgcacagccccatgctctcgccaaaaacgtgcagcacaatttggaagaaaacatttccatctgttaataaagagcaacggcctctggtcataagaagtgacacatgaccctttgcctgagtctttttaaatttttccatatgttccatattttctacaccaaatgtaagctactttcataatcacaaaaacttaatggaaagaggaggaggaggacgggggtggggagtagtagccatgggttcgagcccttcctctccgcatgacttggataacacggtatattcacacagctatttccccatctatgaacttctgaggtgcttttattagttgatgtctgggacccctaggagctctctttatacctcatgatatcaaatgcccacctttccagctcctcttggcctcctgcccttcctggagggagatgcgctccctggagctgctgactaggtggaagcagactggctccttcagtgggtaggccagcctgcctgtctccctagcccagtcccaccgtgctggcctcagtggtggaggcaggcatggagccttggaggaaccactcctccccagccgccaccaacatttgtggcaccgagaagcacccgtgctattccggacagggatggggttggacacccatgcataggggaccctacactcctaggcttggctctgggctaaacagcaggtgtggatttgggcctaggcctcggagaagccatcagctagggcagaattcccatgtgggcaggatgttatttaggaattccagggctttctgtattccagatttcctgtattgtgcatatgtgcgtgcacgtatgtgccctcagccatgatgtaaagtgtttttctggctggggttgcatcacagagtttggaagccactgctctgcagattctgaggaccacctcccttatttctcaccaaattcccatttcttctgtttttgttccacccaatgcaaaaagcatactgccttctcttctgcattggtgggcagcgggtcctgcagctcaggtttctccagccagggccctgaacgtgagcctggtggcgtgggcagggggctgactccatgtgggccaaaggcaacctatccagctcttcagaatggcttttctctcctccctataaaacatattttctctcctccctataaagcctatttttgtattagggtgtttgttaaaatgaaaacatgagatcattgatgcataacgagaagccgtgtcattacttcccaggccctgtgcaaggtgcaaattggcgtgttagtggctgtttgcatcttttcagttcctttcgtcttttctccttatcctgccctttatatggtttctgctttaagtcaaacattgtgagtggattgatggacatatgtgtgtgtgagcgtgtgtgcacagatgcatgagaactgcagagagagatgggaggtaaccagggggatcactgttctcttcttcccaaacattagcgttaggctgttccgcttctgttcttgagagggcacccacattactgcttgggagcctggaaatggccccactgaagcagctctgaggccctggacacccttttcctggttgtggccagctgagttgtgcatggtcctccccgtgggatgtgcttggagcatctgctggtagcagagcctcagttcctctcctgcgttctttcgctacaggtgttagacctgctgcccacctgtgacctgtttactgccagggatagacctgtggccagtgtggaaagcgagatgctttgtccatacagcctgcggggctcagccttcctggggttgcccacagctaggctgggccaggacccccaagcctgggaacttacacctttctcacctgctttcctaaaggtggttttcctttgtgatctctctccctgaacggctaaaccacactctgaatagaaaactgtcttgaaaactgctttgcacgtacatctgataaggtcctctggagggcgacctccactgtctagtgggcgaggattgttcagccgccttggctgagtcaccgagctgccaagggcagactgtaccctgggctcaccagcatgcaaagatattttattcatttatttattccataaatatatatttatattatttatatttagagccagtgtatctctctgtcgctcaggctggagtgcagtggcactatctcactgcagcctcaagctcccgggctcaaggaatcctcctactttgtcctcccaaacaaaaatatttttaaggagcccactaggagagtgctgagtttaaaatctaagttcttgtttcttttttctttttcactgatgcataatagatgtacatagtttcagggtacatgtgatagtttaatgcattcatataattgtgaaaatcaaatcagcctacttggaatatctatcgccttaaatatttgtttttgctttatgctagaaccgttccgattcttctcttctagccattttgaaatatacagtaggcaattgccaactatgatctatgtaaccctaggtcttattccttctatcaaaccacgtatttgtacccttcaatcaacttctctttctccccgtctccccgctacatttccccacctctggtaaccacgcgtctaccctctgtcttcacgagagctacttttttagtaggtgggagagaacattcaatgtttgtctttctgtgcttggcttatttcacttaacataatgatccctagttccatcttgtacaaataacaggctgtcgttcctctgtatggctgaataatattccactgtgtatacacaccacgttctgtttatccatcatccgctgatgaactcagaggctgattccgtattttggcgattgtgagtagtcccgcagtaaacatgagagtgcagatgtctttacgatatattgattttgtttcttttgactataggcccagttagtgaaattactggatcatacagcagttttacttttaggtgtttttttttttgtttgtttgttttttgagatggagtcttgctctgtcactaggctggtgtgcagtggtgtgatcttggctcactgcaacctctgcctcccgggttcctgtgtttaagcgattcccttgcctcagcctcccgagtagctgggatttataggtgcgcaccaccacgcccagctaattttttgtattttagtagagacgggatttcaccatgttggccaggatggtctcgatctcctgaccttgtgatccgcccgcctccacctcccaaagtgctgggattacaggtgtgagacaccgcgcccggccaacttttatttatttatttattttttaaggaggagtcttgctctgtcacccaggctggagtgcaatggtgcgctctccgctcaccgcaatctccacctcctgtgttccagtgattctcctgcctcagtctcccaagtagctgggattacagggtcgcaccaccacgcctggctaattttttatatttttagtagagatggggtttcatcatgttggccaggctggtctcaaactcctgaccttgtgatccccctgctttggcctcccaaagtgctgggaccacaggcgtgagccaccatgcccggccccttttggttttttgaggagcctccatctgttttccatagtggttgtactaatcaacgttcccacaacagtgtgtgagggtccccctttctccacatcctcgccagcatcccttattccctgcgtttttgacgaaagccattttaactgaggtgagagaagacctcattgcagttttttatttgcgtttctctgatgattagtgatgttgagcattttttcatgtacctgctggccatttgtacatcttcttttgagaaatgtctactcaggtctcttgcccattttaaaattcgattaattgtttgctattgtttgagctcctggttatgaatcccttgtcaggtgggtagcttgcaagtattttctcccattctgtgggttgtctcttcagtttgttgactttttcctttggtctgcagagggttcttagcttggtgtgatttcacttgtctgtttttgctttggttgcctgtgcttttggggccctactgaaaaagtctttgctgagaacaatgtcctggagcacttccctaatgttttcttccagtagttttatactttcaggtctcagttttacctttaatccattctgatttgatttctgtgtatggtaagagagacgggtctagtttcattcttctgcatatctttatctagtttcccctgcaccacttatggaagagaccgtcctttcgctcgtatgttgttggtgcctttgctgaagatgagctggctgtaaatgtgtggatttatatctgggttctctattctgttccactggtctatgtgtctgttttacgtgattaccaggctgattaccaggctgataggttggctcatgcctgtaatcccagtacctttggaggcccaggtgggaggatcacttgaagccaggacttcaaaaccagcctgggcaacaaagcaggaccccatctctacaatgttttaaaaaattatttggtgcagtggcatacacctgtagtcccaactacgcaggaggctgaggtgggaggatcctttgagcctaggagtttgaggctgctctgagctgtgattgtgctactgcactccagcctggttgacagagcaaggccctgtctcttaaaaaaaaaaaaaactattgcaagaggagagagagagactgaattcaactctcaatacaacagagacaagtggggatagccaatgagcagggtgagggaggtgatgaaaagttgttgaaaggagcttggttagttagcaagggtggggaagattctcactaaggaccttagcagcattccttgctagcactgagctcagcaggccaaggatgaggcttcatcaaggagaaggctcaaaggagcctgagtggagtttggtcaaggagagcgtctttgtcatccttgcaatgactcattttataggtaattaagtagggggttcagacaggtcaaagacttaccaaaaagaggaaattgtgtccatgtggctggtggctcaccccaggaactgacagtggcttactctcagaaactcagagtgtgcgtgtctctttgaatccgtatctgtgtgtgggtgggtgcgtctgtctgtgtgcgtgcctcagtctcttctgaatttctctcccaatccccgtctctctttcctcgggttggtgtttccctcctgctggcctctggccagctatttctggaagtgtcagctgctctgtcttcctgcccctgtctccaccatcacgtctgtgtctgactccctttctttcccatacaaaacccctaatgcaagtcctactgtttctgtaactggccactgcctataacaaatctttgcttaggttgtgtttctttgtagaatagactgatgtactgtgtgcttgatttttacaagatgagcacaataccttatctttcttctttattaaaaaaaaggaaaaatccaaacacaagattaatatctcgtcatggactgtgccccgctcgagcctctccacatgcagccggaaggaaagtggagggagctgctcctttccgtagccggggtgcccaccccaaccaggctgcctctgccacccaagacagaggttctctgataataatttgtggggcttgtttccagagaccacacctgaagctgccaactccccggagggaaggtcctgattaatggccgatgaatttctccttaaggccctgaaactgcctactcagaaccaagccagtttttcctgcctgtcctgtttgggcaggcagaggaggcagctagaaacccattatgcaggggatgggggtaagtggaggagggaggggtcgggggaggagtggggaggaggaggagggaaacaggaaaccccaggctttggctatgatggggtcagcctttctacaccattccgggatgctggtgtccaccactgctgcctgggcacggggaacagagaatctgcctggtgggagcagacaagaggttcgaggaccagagctcatcctcttcggtgtgtgcctgggaggaggtgtaggtgcagccagtggggtatgattaaaaagaagggacgcgagtttaggggacagccgcccacgtgcaccagctctccgtgtgccaaaatcttgcctgtcagggaccaggatcccacttcacagttagcaaatagcagctcagggacattaagcaactcgcccagcatcccaccagcagacagtctcaccttcagggtcgtctgtgtctgttaaagtcgagtctagtttcgggtctcagagcacctccctaaagctgccgtaaaccaagaataaaattctaagccccacagccgatcgcgtggaccccgcctctgggccaaagggattccagagaaacctgaagaactagttcaggccgtgatgaggaggagtgggggctggacaggcctcattgtaccctcctccctttggaatttgggcagaactgaccagaaccaacattaaaacagagatctgaagactgacaaggctctctagcaataagataccaaattccaacctgactccagtgcagcatcacatgacagacagaggccatgaaatcaatattttacctcaaaatatatttctttgacatactttgaaatggccctgccaagctgtctcttgtgggggacatttacattctgtagagaatcccttccctttccaggtctttctctgatcctgaagacattggctgagagcctagcaccttctatgggtctgaacaggaaacatttgccatctattgtctctaagggtggccacctatgaaacttcatctacataataagaaccttggtctgcacagtctcttatcttaacccagactctcctttctattgatagcaggtctgtagataataattctttcaaccaattgagaatcagaaaatctttgaatctatctatgacctgtaaaccccattactttgaattttcctccttccagaccaaaccaatgcacaactcctacgtactgatggtggtcttacgtttccctaagtttctgccgactaaactgtgcacacgttctcaggacctcctgaagctgcgtcacaggcgctgatcaaagaacacaaccaaggtgagtgtcaatcatttcaagaaatctgtttgcaaggttaaggacacacctgagaaaagaacagagaaccacaggaaaaactgtggtccgtgcttttcccaaaggttgtctggggacctcagtaagtaaaggggagaagtgtgggtgttggggaaaggggaagaagtggaaaaaatgggtgtgggtaaatcagaggcaaatggttgcattcttctgtctttggtcagcgttcactgaatacacattttacatgtgatggaggtagaggcagggatgtagcttttttatctttgtgtaatagctatcttatttaggaaccagatgggaagcaggtttgcataagccagttcccagcttggcttttccctttggcttagtgagtctggggtcccaggatttattttccgttctcacaggttgtagtcctcacatttggctcaaaatattcaaaattttttccagagtttggccttttcttcagcactgggaattgtgatccaaagcttttcctgatgaggtacaaagttggagaaacaaaacgcaaactaagcaacaatgaaacagaacagagtgaatctgctgtagctcaagagaggacgtagctgcccccaccccgcatccctgggctcgggtttgccttgctgacctctgctgccacctggtgccgcacagagaaactgaggagaaaccacatcagtctccttcagcctcagcttcacatctgtgggtcaagcaaccctttcagaagctgtataatgtgggaaagctttcctctcaggaaaatgcacacatccaactttgagaagatgcccttgggggtgcttcaaggatcctagataataaccccctttcccgaacatccaagaacctaagtttttttttttttttttgagaaagtctcgctctctctcccattctggagtgcagtggcgtgatcttggctcactgcaagctccacctcccaggttcaagccattctcctgcctcagcctcccaagtagctggggctacaggcacctgccaccacacccggctaatttttttgtatttttagtagagacggggtttcaccgtgttagccagaatcgtcttgatctcctgaccttgtgatccacccgcctcggcctcccaaagtgctgggattacaggtgtgagccaccacacctggtccaagaacccaacttttagatctagagtgatgtcagcatgacattgatttcctgaggcccaggggtgaaggagctgaggacagcagaggggtgaaggaagtcagctacagacagcagcagctgatgcacaggcctcccagcgcctgaagtcacccggaattgggaagtgctcagaagcttacaaagctgcctcgaggtgggaacacaacattaatccaagagcagatccctgatcctataaaaatgtactagatgcagtgggggcattttaaatgagcagggaaggacagacagataaacagaaggacaaacagtattgggattgggataaatgctcagcttttgcccaaatcttagtgacttaagcatcacttatttgctcacgattctgtggctggaccatttggtttggctcacagggcagggactgtgctggtcttacctgagcagacctgcatgtctgcggtcaactgggttggcagagacagagtgactgtcttcctccaggaagcagcaggttaactggttggcagagacagagggactgagggactgtctccctccaggaagcagcaggttaactggttggcagagacagagggacagagggactgtcttcctccaggaagcagcaggttggctctggttccttcgtggggcagctggtctccagggcagcaagagagaccaagcccccgtgcacattctacagcctctgtgcacatcagacttgttaatatcccattggccagtgcaagtcacacggccaagcccagattaaggagtggaaagatggacgctatctcctcctgggagaggaggcaaaggaggtgagagcattatgtggccacttatgtttgcaatctaccatacttagccctttgagaaaagaattaactgagaaacttgcttcaaatagggcattcagtaaaatgaagccccaattgaagtaaaatgcatatataaaaaatgaaactgtgaccgattttaaggacagtattggcaaatatttctgtgctcttggaggagaagacccttattggcatgacgtgtcagaaaccacaatgaaagaattattttaacttgcattcataaaaattaaaattattcattaaaaacatcgtgaatgaaattaaaagtcaaaatgtaagccagaaaattatttacaacatatgtgtcaggaaaagacaatacccttcagactttgagagtttacatcagaaagaaaatagcaaatgacatgatccaaacttgataaaggacatgaaaaagagccagcacttagtatgttttctgaatgaataagtagccaacagcacatgaaaatgtgtgtaatccacttgtaagcagagaaatgcaaattaaaacagtaaagtgtcattttcacttcctggattggcaaagggttttatgtattttactgacagtgctcaacattagcagtaaacaacaaatggtgagtaaatatgagcttcggaacctcagggaaatgatctccttatttcaacctgtagattccttcctacaaccagtgtagagcagagtaccaggacgggccattgagcaccctggtgttgagagcaagtggcctctagtcagagttgggtcagggccactgtgagtgggctgcccccaacatgagtcagctgtctaggactagtttatctctgcttctcactttactggtattatggggcagctcctgctgtcttccaatttggtgtcttccaaatcggcaccgtcttttaaagttgagtttcttgttattctcacctgatataccttatttatcccacacccaccccaataacatatcgtgctcagtgttatctttgagacaacacttgaattttactcagcctggcgtgctcttcacatgtcttgtctagatccagttcggactcattcttcagccgtgcatcagtaaatgggggctaggttaaactgtggtgacaaacaacctccaaatttcagtggctcaaaaatcttcttcctcatttatttacatttcatcatgggtcaggtgagaggtagctctgtgccgtgtcatcctaacacaggaatccagacagaaggagggacaatcagtaagatccccattgctatagaaaagagaaaaaagtatgcggaatagaactctgtttcttggagatttctcctgaaaaagtcacatgttatttcttctcacctccattggcaaaaaaaaagtcatgtggccatgtgaaaatgtaagtaggcgggatggaacagtcagaatgcattcataaaatatgaactgaaaatatctggagaacagcacctatgactaccacgaatgccaacatgcatccctaacaacccagtgctgtcaccctccaaactttttatgtcttgcaaagtattagaacttcttatctgaagccataccactcagagggaatgcaaaatacatattgacatctcctttaggatgtccttagagaattcaaggaaaagaagttaaataatttaaaagtgcttttgggtacagctatttagcactagagggtaagattagacatagattgtaaagataataatagggttagggataggattaggatctgggtcagagtcagggccagaagtatggttagaggtggggtcatggtcagggtcgagatcaaagtcagggtcagaattagggaccaggatagggatcaggatttaggttcagtgtcaaagtcttgggacaaggttagggttagaattagaaccagagctttgttctcctcaggacccacccgagggtgggtcaccatggctttggagcccctggtagtgtggcgtgtccacagtgaagaccagagtttcattgtccttaagactgacctggggagacgtggctgcaggccattgaggaaggtgaggaaaaacttcctgtctgctccccgtgtgctgaggagggagctctgccgtgggctttactttcacatgttatattccacaagtcttgttttacaaaagcatcccttccttgaggcttcggctgctcatcgctgctcatcatcatagcgtgccataacatatagtaagatttgggtttgtttctggggagagatcttggtatagagaaaggagaaatgcttagagccaccatcaggacagttgggatgaaagttgggtataggcagaggctggaggaaacatgtgcatcccctgtaaacacttttattcatgttttaattactcatttttcttacagtgttaaattagtaaagatagtattgaaaaattgaaaagtaggcatattaaaacctgcaacactatttaagcttagatatattatttgtacctcatcaacattttttattttgttgagaaagtttaaggttaattgacagcatatttctaatagtagatagaataacatcccttttataaacattgacatcctacattacatgtgtgaaccctgaaaatctgagacagctctcagattttttagaaagtttattttgccaatcttgaggatgtgcacctgtgatgcctcctcaggagatcctgacaacatgggcccaaggtggtcggggcacagcttggttttatacactttagggagacacgagagatcaatcaatatgtgtaagatgtacattggttcagtccagaaaggtgagaaggccagacagggggcttccaggtcacaggtaggtaagagacaaatggtttcattcttttgcattgctgattaccctctccacgtgaggcaatcaggtatgcatttatctcggtgatcagacgggtgtctttggatagaatgggaggcgggtttgccctaggcagttcccagcttgacttttccctttagcttagtgattttgggtccccaagatttattttcccttcgtaagtgttcctatgagtattaattattcattgtgtcttttattacacaaataaggcacagatttttaagaaatcatcaacttcatggctacctatatagacataattacatagaagctcaactaaatttgcaaacattccagagtttgggtttccaataattctttgtgattctttaaaaggtaaagtattttttcccataaaacatagcaacatttaaaatcaaccgtagaatgtcctgccatttttgtttctctagtttcctcattttctgcaaagcctcactgaggaaattgactttgaatatccttttagactcttgttttagaaagcattgtggtaaaacattgaatcatcgtggtcacaagttctgttcacattctttctttctttgaatattttttcccagtggccaatatttgattctgttgtatcatggctaaaaggtaggcatggcaacaaaataaagacaagaagtctttggaataattgatcccatcacaatgaatcaatttgccattggaacatgtttttacaaagtcactcttttgaaaatattcagctatgacttgaaacagagtctgtatggttaatatttttcctggtctaagatgaacagcattttagagaatgaacccaggacacaaccacagcacaagaaaaacatgtgataattaagtttacacatgtgtgttactacagtaacagaaaacatgtaaagaacatttgatttatgtatcagtctgcactgtttaattttttgtgtcataattgctcttattttaaaaaacaggactagttaacagtgtcaattactagtaattcatggtataaataattaaacaaggaagtgttaaaaaaagtgttttaaataaagttttattttacgtcttttttttacttacacagaaatcgtcaaaaaaaaaaaaagcagagatttcccatgtagccgcaacctagtttcctctcttattaacatcttctatcagtgtgtctcacatggcttattaatatcttacataatttgccgcagttaatgaaccaatactgatagactgttattaactaaagttcatatttcatttggattcccttagttctatcttactctgacccaggatcccatccaggatcccacacgacatgtagtcatcacataggctcttcctggctgtgacagtgtgttaggctttccatctcatgatgaccttcatagcactgaggaggactggtcaggaatgttgtagaatgtcccccattgtcacttcatgttctcaaggtgaactgtcacctttgatgttcacttggatcatttggcagagctaatgtttgtcaggtttctccactgtgaggttatttctcctccttgtccgcactgcatgtgttcttttggagcaagtcactatgcagagcctcactccgtcaggagttggctccaccttcttgacggctgagtgtctacatcaattatttggaattcttttgcaaaggagatttctatgcaactccatttgcttattcacctaggtatacaaatacagacacctagataattaccttaagctttagttattattcaacactacagtattatgttgcacaattcattcctgtgttggccatcagtagctgtttttattggctcttatttttctttgatatgttttaatttttttgtacttactttctgatacttccagattatcctggctcctatatttactgtcccagttctagtatcagacatttcttcaaagagcctgattcctttcagaatggtaggaaaacttacatctggctgctgaatgagcacattgtatcttctccctcattggcaatgctaggaagtatatgtgtgtgtctaacctacctatacacacctaattataaagttttctatgtagaactgtgtgtgtctatattaaactaaacataagtttacattgatgtctccacctctgatctactatcacatgaatcattctagccttctcgccttgctaatttgtaacctcccacttcaacagtaagaaacctggttcccaccatctgcgacttatgtaagtcattgttttattccagatacagacactgtggttttacaattgttcacaattgcttctgttggaaagaactttataaaatggaatccaataatgaagtatagttcatgtgccttcagcctacagattcttttcattttcaaagtttttacctagatttgtgtctcagtccattttgtgcttctgtaacagaatacctgaggctgcgtaatttataagtaaaaaagtttcatttgtttgacaatactggtggctggaatgtgtgagattgggcagttgcatctggcggggcctcagtctttttcacctcatggtggaaagtggaaggggagcaaggggtgcaccagagatcacacagcagaagtgaaagcaagagggaagccaaggaagccagactctttttaattacctactcctgcaggaattatctattcctgtgagaacagaactcactcacccccatggaggacattaatctattcatgagggatccgtccccacgacccaaacaccatccactaggccccaccgccccacactgacgcagtgggagtcaaatttcaacatgagtttttgtggggacaaaccacatccaaaccatagtaatttgtagcataaattctttttcacatgatgtattctgtcctgggatactccacatcctgagtaattggatttaatttgaatagagtttgctttaaccatttggctgtaaaattctgcgtatttcgacaaatgcattgtggcagatatcccactattaaagtatcatatggaatgcctcaaacccccaccccatggagccaatggcttcccatctgtgtagtttgccttctccagtgtctcattaaatgaggtcacactgtgtgtatcctcctcagactgtcttcttccacttagcaatgtgcatgcaagattcactcatgtctttgtgtgtgttgatatcttgttcctttctatggctaaatagtattccattacatgaatgtagcacaatttggttatgcattttggggagcagaaccttcctcttctaactttgttccagggttggagaccttcaaattaactgacactagatacattagtaggagagacaatacttggcttcttgttccccaagtatcattgtgggacaaaattcatcagatggcaggatccagtttacaaagaggtaaaaatagcccagaaacaagaaacaagactagaatctgataactcacaatggctatagttttcctttaaaaaatttttttttgagacagggtctggctctgtcacccaggctggagtgcaaaggtgcaatctcagctcactgcaacctctacctcctgggtgcaaacgatcctccctcctcagcctcctgattacctgggacacaggcacatgccgtcatgcccatctaatttttgtatttttggtagagacggggtttcaccatgtcgcccaggctgatgttgaactcctggccttccaaagggctgtaattataggcatgtgccaccatgcccggctgtgttatacttttcctttgaaagataaaatttctctctgtagtaaccatcatttttgatcataatcaaagtaagactattcttgttttaaaaataagtctagttttgttagattttgcttgattatttacgtaagtgcagcaagaacaggagatgaccacgtaggtgctttcaggtttctttgctggaagttttcatacagaatctcagatttgacttttaaaggccttattcaggctaaaagccaagccaagaacatgctatcaaatttcagctgcagtccttatagctttgtgtgaattcctctcttcttgaggccccaaaatatccctaaattcctgggcctaccaggaaatgaccttccttactaacctataaggctgtgaaccctgtaatctaggtatcaggctgggttttctcagagtgctgttgggaatgaagttttttatgttcccccccccaaaaaaagaactaacatgggaacaaatgatctcttagcaaggcgagctttatttttctgcacaaagggtgctactcaatagctgtccagctacaagagcacaccaaacaaaggagacagagttacttataacctgacgtgtctaccctactgctgtgtccagtttccattggctggaataggacctcccattttacactttacccgattggctgtttgtttaaaactttcttaattaggtaaggggaatagaagaaagaaagaaaaggaagttgcccagggatagttaaggaagcatctccaaataaggaatggcatgcagtatgggctggggcttgtctagttctgtccaggcatgctggagcaagctaggacaagtgatttggaacacacacacacacacacacacacacacacacacacacacatataaaaatagtgggtagttgtgactttataatctttgaggaagaactttcctcaaagttttccacagtgctttgtaagcattgtctccataaaagtgaaccttacttccttaaaattgctggtcataactgatcttaggtacacttcctaattatgatgttccagtaaaaaccttgataatataaccaaaatttccaattatgtcctgttataaggtgaatagattcttattggacttttgctaacaactatatcatcgtggaaataagagtattcagtaaggatttcaaaattctggaaaaatcaggcaagaaaaaaagataaacgcttcatttctgtttacaaaagtataatctactaaattgttgtaagttacagttagagtaagagaaagagatttcttaaatccagaaactagaatattaaccagcaatgctccaaaaagctatacaattataatcaattttcatcagttcattcagtgccatgtaatcaattccagtcttgtggatcttgagttagcagtgtcatgaacccatcagtttcccaaccggacttctggagaccttaactgagtcaagtgtatggtcttaaagttatttaagcaatatcatcagaagcctataaccagagtacctgtcatagtcttttctgtgagtctcagagggagtcctgtcttggagacgaacattctgacctgtagttgattgcaggagctttcaggaaagcatcagggggaaataatatctaaatgacaaaaagtatgaaatggctgtgatgaaagatctgatgagagttcattataccacaactgacaaggatattcgattttttctgtggcagacaacatttatttatttctttatttagagacagagtcttgctctgtcgcccaggctggagtgcagcggtgcgatctgggctcactgcaagctctgtctcttgggttcacgccattctcctgcctcagcctcctgagtagctgggactacaggtgcctgccatcacgccgggctaattttttatatttttaatagagatggagattcaccgggttagccaggatggtctggatctcctgaccttgtgatccacccgcctcagcctcctaaagtgctgggattataggcatgagccactgtgcctggcacaacatttaaagtaataattggaattatgactcattactctatagtggcacatagcatggataaggaggacattgacaaacttccaggaattttatataatttctgaaaacataacattttacccatacaaatataacacagggaaggttaggtatctctttttatttgtatcttctgtatggttttccttataaaaaatgcaacctactttacttgcgaaacatgccctacttttcttgcatgctttgcatagtttctagttattctattatttctagtagttttatttacatatattgattataattttaatacttagtaatcttttattttccagagaaaactaggaagtagacagttataaactgtcatatattagcattctatagtaggttagaaaatgtatgaatataccatctcccaacatctagagggatgtgtttcctcataatacaattcctcagtgtggcagaaaaaaacatgtttattaacgggccaaaatatctttagtctctctgtaaaaataggaagccaaaagtacataaacttgaattatttatgttcagtaattaatgttttagtattgtatcttatttataaatgatctagatatttaatgcaaatcttttacttagcttaactttaaggttaaaaattaccaaaagtactttggaaactattcttaggcagatttactgtaaacaaattatttttgaaataatgtttttcgcttttcacaagatggcaccaaaagcgaaggaagctcctgctcctcctaaagccgaagccaaagcgaaggctttaaaggccaagaaggcagtgttgaaaggtgtccgcagccacacgcaaaaaagaagatccgcatgtcactcaccttcaggcggcccaagacactgcgactccggaggcagcccagatatcctcggaagagtacccccacgagaaacaagcttggccactatgctatcatcaagtttccgctggccactgagtcggccgtgaagaagatagaagaaaacaacacgcttgtgttcactgtggatgttaaagccaacaagcaccagatcagacaggctgtgaagaaggtctatgacagtgatgtggccaaggtcaccaccctgatttgtcctgataaagagaagaaggcatatgttcgacttgctcctgattatgatgctttcgatgttgtaacaaaattgggatcacctaaactgagtccagctggctaactctaaatatatgtgtatcttttcagcataaaaaaataatgtttttcataagaatgacaacttaattagaatcaaatctataagctttaagattttatgtttctagtaagtataatattagcttatttgactagaactcaagcagaataggaatttatgcttgttttatattcaataataattttgaagatacagttgttttattacaccaaaaatactatattaatcttatttaactaagttttatccaaatcatgttaacttaagaaacatttgatcagttcctatatttctaggagtttggtgaatatttatttataaatgcttatttttttccaagccaagttagaatagagcacttttagaggatttcataaatgaattttgcaatgctctctggagttaagaaaatatcacatatacataacatacattaatagatacacaaacacaaatagagatttcatagctttcatcctgaaatttcagccatgaatcaggcataaatattctgatggttaatttcagacatctacttgatcggattgagagacacacatagctggtcaaacacgatttcagccatgaatcaggcataaatattctgatggttaattttagacatctacttgagtggattaagagacacacatagctggtcaaacacaatttcagccatgaatcaggcataaatattctgacggttaattttagacatctacttgatcggattgagagacacacatagctggtcaaacacgatttcagccatgaatcaggcataaatattctgatggttaattttagacatctacttgagtggattgagagacacacatagctgttcaaacacgatttcagccatgaatcaggcataaatattctgtggttaattttagacatctacttgagtggattgagagacacacatagctggtcaaacaatttcagccatgaatcaggcataaatattctgacggttaattttagacatctacttgagtggattgagagacacacatagctggtcaaacacgatttcagccatgaatcaggcataaatattctgtggttaattttagacatctacttgagtggattgagagacacacatagctggtcaaacaatttcagccatgaatcaggcataaatattctgacggttaattttagacatctacttgagtggattgagagacacacatagctggtcaaacacgatttcagccatgaatcaggcataaatattctgacggttaattttagacatcaacttgactggattaagggacacacatagctggtcaaacacgatttcagccatgaatcaggcataaatattctgacggttaattgtagacatctacttgactggattgagagacacacatagctggtcaaacacgatttcagccatgaatcaggcataaatattctgatggttaattgtagacatctacttgactggattgagagacacacatagctggtcaaacacgatttcagccatgaatcaggcataaatattctgacggttaattttagacatcaacttgactggattaagggacacacatagctggtcaaacacgatttcagccatgaatcaggcataatattctgatggttaattttagacatctacttgagtggattgagagacacacatagctggtcaaacatgatttcagccatgaatcaggcataaatattctgatggttaattttaggcatctacttgagtggattgagagacacacatagctggtcaaacaatttcagccatgaatcaggcataaatattctgatggttaattttagacatctacttgagtggattgagagacacacatagctggtcaaacaatttcagccatgaatcaggcataaatattctgacggttaattttagacatctacttgagtggattgagagacacacatagctggtcaaacacgatttcagccatgaatcaggcataaatattctgacggttaattttagacatcaacttgactggattaagggacacacatagctggtcaaacacgatttcagccatgaatcaggcatacatattctgatggttaattgtagacatctacttgactggattgagagacacacatagctggtcaaacaggatttcagccatgaatcagacataaatattctgatggttaattgtagacgtctacttgactggattgagagacacacatagctggtcaaacacgatttcagccatgaatcaggcataaatattctgatggttaatcgtagacgtctacttgactggattgagagacacacacagctggtcaaacacgatttctgggcatatctatgagggtgtttctggaagacactgagataaccatgacccaatgtggatgggcactgatatggtttggctgtgtccccacccagatctcatcttgaattgtagttcctgtaatacctacatgtcgtgggagggacccaatgggaggtgactgaatcatggtggtggttaccgccatgctgttctcatgacagtgagtgagttctcatgatctgatggttttataaggggcttttcccctttggctcagcacttcttgttgctgccatgtgaagagggatagctttgcttccccttctgccatgattgtgaggcccctgcagccatgtggaactgtcagcccattaaacccctttgttctttataaattgctcagactcagatatttcttcatagctgtataaaaatggatgaatacaggcagcatccaattggttgagagcccagatagaataacaaggaagaggaaaggtgaattatctccttctgaaatggaaacatccttcttctcctgcccttgacatcagaacttcagggtctcagacctttggcctcacaatcagagttacaccattggcttccccgattctgagtcctttgtatctggagtgagccatgctaccagctttcctggttctccaacttggagacaggctattgtggaacttctcagcctccataattatgtgaaccagttcccctaatgaatcttctctcatctgtctacatatatcctattgattctgcctttctggagacccctgactaatgtgattacaataactacacaattcactagtttatatagaagacttggtttttgtctttgccccattttatatttgtattataactatgtatctggaaaatggaacaagttttttcttcttcatatgagggctaaggcttttttctcaccaatatttttggagattttaaagattttctttttttttgacatagaatcttatggaggctgagaaataattttttttctattttattcttcagccccaggtgtttgcttttgcagattcttgagcacattgagagcctccaaggcatggagtggggtgcctgaagtttcagtgattatagggagttgagagactcaactgggaaaggaaaggtctaaaaggaggcaatttggaagataaaaattttctcaaaggagccattaaagttgtaaataattcttagtaaagtcatgcaaacaggaaaagaagtagaattagttccatattggtggaacacatagtcagcagaggtttgagaagggagaatttagtgaagtgagaagttcccatgaaagcagcaagatcaagatcacagacaccttgaaacaaaaagccaggaataacttccaacccaagaggagaacagagaggcctcaaaaccaaagctaggataagaaacttgtagcccaagagttatcttccagacaaagaagcctgagattccaacgcagcttcagagagtgctcactcaaaatgttactaaaactgtaggctttttaatgacttagccatgcctgcaaaaggcattccctaaggtggcacagaagacggagcccccatatccaaagatagccaaggagaaagaaagacccctgttgccagagccagtgggcaaaggcaacagaaaaggagacaagggtcctaatgggatgagatcctttcggatttaggcttttatacaaactcctgagaactggcaggttgacagccataaatggggtaccaaactttctactcattggattacaagttctcaggcatccagaatgatgaacaaaatgacaatttctagggcttctgtgggagagtatggaaaggtctttttgaaccttttaatgctgtgaacggaagaatgatgaggttcataaatttggaaaggagacatttcttcatttttatgcttatttttattttttttgagacagagtttcactcttgttgcccaggctggagtgcaatggcatgatcttggttcactgcaacctccacctcctgggttcaagcgattctcctgcctcagcctcctgattagctgggattacagatgcccaccaccacacctggctaattttttgcagttttggtagagacaggatttcatcatgttggccaggctggtctgaaactcctgacctcaggtgatccacccacctcggcctcccaaagtgctgggattacaggcatgagccacccacccagtgagagatttattttctataaagggttgtagcctgcagggttgtccttctgacaggctgggaagcatagcctccagccagaagccagaaacagatgcttcaaggaggaggtaaaggaaatagcaacttatgctgagtggaatggccaaatagatttatttaataagctctaggaggagtcatgaatatttatggaaggagaaatgcatgcacgcacaattgagtttcttgcttcttcatgggtcccatgtacaaaaaatggcagtgttagcatgatcccagggtggagttttcagccctctgacattaaaaggtgaagtagaggacatgaaaacttgctctgtgcatcctctgtacgctggccagaacctctccatcgtgggtggtctcttatcagggaagaaaggagaggttgatatcagtggtggaggctttgaaagggctggtttctgttaaatccttagggaagaaagcctcatcatggttagcaaaggagggggtataacgatgtgtatcttaaccccatcatcccatcctagcaaagctgagaactcagttttgaaagttactctggggtcccctcagccaagagtgggtctgttcagtcagttgggagcttagaatttaattttcatttatcaatgctaatgggaaagagtacgctgtcttcatggcagctgaatttgcaagaaactccttggatggggttaatggcagctgtatttttctgggagctgtgctttaattggataaagtaagttctggtaagatttcttcatcttcagtatctcaaatgttttcatttaaataatctttataacaacttttgatgtctgagtggattcccacacagtcatctattgtaagactttctgattccttttttttcctttggtcattatgaatagggcttctgtaaataactgcatggtagcttttgatgggaaataacatcaaagtagttgtcaaaatacctaggaatgttatttttggattgtaaggtgagacttgtttagctttggaaaaaaatgcccaacttgtaataggggaggaaaaataattttctgtttttggaattcttagatggaacgctctgtaaaaactgacagattaaaatgagaaaaagagaaaagtttaaaaacatgtatatcttatggttacatgggagatactcagggaaaaatgagtaaatctccaacaggtggctttcaattcaagcataaatactatcttcaacttaaagaaagaagatttgaggtgcagtagtggggagttaaccagcaaaagcacattagacaagggtaaggttcgttatacagacttaagtccatgcattctccattgataagactcttcagtgatttagttatccttctcttcttggtgttgagagaggtagcttttaaatggtgatttcctttatagatgtaaattttccttacacaagtaacttctactttattttcacaacttcctttgttagcattttttttttccaaaataattagcttggaataattcttaagccaaagggacatattttggggttgcatattctggtttcctaccattatattttggggtggcatagtttggtcttatacactgtgttccactggcaatgaaaagagttcttgtttttcctccagcaatttgtcatttgttaaagagcttagcagttctaagagatatagaccagctgtgctatctttttgtggttttcagttctctagtatgttgagcatctttttgtaagtgtacttgccatctgtagatcttctttggtgaagtgtctgttcagatctgtgtgcatttttaattgggttgtttaacttattgtttagttttaacaattttttatatattttgaatacaaattctcagatctgtattttgcaaatattttcttcaatatgtggcttgtgtttttgttctcttgacaaggtctcttccagagtataaactgtaaatattaagaaatccacattgtcatttcttctgtgtatatcaaccttctgtgtcatttgttaaaattcattaccaaacgcaaaggcacacagcttttcctctatagtttcttctagaaattgtatagttttgcatttttagtgtaaggatgattttgagtgattatttgtgtaagttgtaaagttttcatctacatgtgagggtgagggtgagggtgagggttaggggttaggggttaggggttagggctagggctagggctagggctagggctagggctagggtttagggttagggttagggttagggttagggttagggttaggttagggtgagggtgagggtgagggtgagggtgagggtgagggtgagggtttagggttggggttggggttggggttggggttggggttggggttagggttagggttagggttagggttagggttagggtgtgggtgtgggtgtgggtgtgggtgtggtgtgtgggtgtgggtgtggtnnnnnnnnnnnnnnnnnnnnnnnnnnnnnnnnnnnnnnnnnnnnnnnnnnnnnnnnnnnnnnnnnnnnnnnnnnnnnnnnnnnnnnnnnnnnnnnnnnnnnnnnnnnnnnnnnnnnnnnnnnnnnnnnnnnnnnnnnnnnnnnnnnnnnnnnnnnnnnnnnnnnnnnnnnnnnnnnnnnnnnnnnnnnnnnnnnnnnnnnnnnnnnnnnnnnnnnnnnnnnnnnnnnnnnnnnnnnnnnnnnnnnnnnnnnnnnnnnnnnnnnnnnnnnnnnnnnnnnnnnnnnnnnnnnnnnnnnnnnnnnnnnnnnnnnnnnnnnnnnnnnnnnnnnnnnnnnnnnnnnnnnnnnnnnnnnnnnnnnnnnnnnnnnnnnnnnnnnnnnnnnnnnnnnnnnnnnnnnnnnnnnnnnnnnnnnnnnnnnnnnnnnnnnnnnnnnnnnnnnnnnnnnnnnnnnnnnnnnnnnnnnnnnnnnnnnnnnnnnnnnnnnnnnnnnnnnnnnnnnnnnnnnnnnnnnnnnnnnnnnnnnnnnnnnnnnnnnnnnnnnnnnnnnnnnnnnnnnnnnnnnnnnnnnnnnnnnnnnnnnnnnnnnnnnnnnnnnnnnnnnnnnnnnnnnnnnnnnnnnnnnnnnnnnnnnnnnnnnnnnnnnnnnnnnnnnnnnnnnnnnnnnnnnnnnnnnnnnnnnnnnnnnnnnnnnnnnnnnnnnnnnnnnnnnnnnnnnnnnnnnnnnnnnnnnnnnnnnnnnnnnnnnnnnnnnnnnnnnnnnnnnnnnnnnnnnnnnnnnnnnnnnnnnnnnnnnnnnnnnnnnnnnnnnnnnnnnnnnnnnnnnnnnnnnnnnnnnnnnnnnnnnnnnnnnnnnnnnnnnnnnnnnnnnnnnnnnnnnnnnnnnnnnnnnnnnnnnnnnnnnnnnnnnnnnnnnnnnnnnnnnnnnnnnnnnnnnnnnnnnnnnnnnnnnnnnnnnnnnnnnnnnnnnnnnnnnnnnnnnnnnnnnnnnnnnnnnnnnnnnnnnnnnnnnnnnnnnnnnnnnnnnnnnnnnnnnnnnnnnnnnnnnnnnnnnnnnnnnnnnnnnnnnnnnnnnnnnnnnnnnnnnnnnnnnnnnnnnnnnnnnnnnnnnnnnnnnnnnnnnnnnnnnnnnnnnnnnnnnnnnnnnnnnnnnnnnnnnnnnnnnnnnnnnnnnnnnnnnnnnnnnnnnnnnnnnnnnnnnnnnnnnnnnnnnnnnnnnnnnnnnnnnnnnnnnnnnnnnnnnnnnnnnnnnnnnnnnnnnnnnnnnnnnnnnnnnnnnnnnnnnnnnnnnnnnnnnnnnnnnnnnnnnnnnnnnnnnnnnnnnnnnnnnnnnnnnnnnnnnnnnnnnnnnnnnnnnnnnnnnnnnnnnnnnnnnnnnnnnnnnnnnnnnnnnnnnnnnnnnnnnnnnnnnnnnnnnnnnnnnnnnnnnnnnnnnnnnnnnnnnnnnnnnnnnnnnnnnnnnnnnnnnnnnnnnnnnnnnnnnnnnnnnnnnnnnnnnnnnnnnnnnnnnnnnnnnnnnnnnnnnnnnnnnnnnnnnnnnnnnnnnnnnnnnnnnnnnnnnnnnnnnnnnnnnnnnnnnnnnnnnnnnnnnnnnnnnnnnnnnnnnnnnnnnnnnnnnnnnnnnnnnnnnnnnnnnnnnnnnnnnnnnnnnnnnnnnnnnnnnnnnnnnnnnnnnnnnnnnnnnnnnnnnnnnnnnnnnnnnnnnnnnnnnnnnnnnnnnnnnnnnnnnnnnnnnnnnnnnnnnnnnnnnnnnnnnnnnnnnnnnnnnnnnnnnnnnnnnnnnnnnnnnnnnnnnnnnnnnnnnnnnnnnnnnnnnnnnnnnnnnnnnnnnnnnnnnnnnnnnnnnnnnnnnnnnnnnnnnnnnnnnnnnnnnnnnnnnnnnnnnnnnnnnnnnnnnnnnnnnnnnnnnnnnnnnnnnnnnnnnnnnnnnnnnnnnnnnnnnnnnnnnnnnnnnnnnnnnnnnnnnnnnnnnnnnnnnnnnnnnnnnnnnnnnnnnnnnnnnnnnnnnnnnnnnnnnnnnnnnnnnnnnnnnnnnnnnnnnnnnnnnnnnnnnnnnnnnnnnnnnnnnnnnnnnnnnnnnnnnnnnnnnnnnnnnnnnnnnnnnnnnnnnnnnnnnnnnnnnnnnnnnnnnnnnnnnnnnnnnnnnnnnnnnnnnnnnnnnnnnnnnnnnnnnnnnnnnnnnnnnnnnnnnnnnnnnnnnnnnnnnnnnnnnnnnnnnnnnnnnnnnnnnnnnnnnnnnnnnnnnnnnnnnnnnnnnnnnnnnnnnnnnnnnnnnnnnnnnnnnnnnnnnnnnnnnnnnnnnnnnnnnnnnnnnnnnnnnnnnnnnnnnnnnnnnnnnnnnnnnnnnnnnnnnnnnnnnnnnnnnnnnnnnnnnnnnnnnnnnnnnnnnnnnnnnnnnnnnnnnnnnnnnnnnnnnnnnnnnnnnnnnnnnnnnnnnnnnnnnnnnnnnnnnnnnnnnnnnnnnnnnnnnnnnnnnnnnnnnnnnnnnnnnnnnnnnnnnnnnnnnnnnnnnnnnnnnnnnnnnnnnnnnnnnnnnnnnnnnnnnnnnnnnnnnnnnnnnnnnnnnnnnnnnnnnnnnnnnnnnnnnnnnnnnnnnnnnnnnnnnnnnnnnnnnnnnnnnnnnnnnnnnnnnnnnnnnnnnnnnnnnnnnnnnnnnnnnnnnnnnnnnnnnnnnnnnnnnnnnnnnnnnnnnnnnnnnnnnnnnnnnnnnnnnnnnnnnnnnnnnnnnnnnnnnnnnnnnnnnnnnnnnnnnnnnnnnnnnnnnnnnnnnnnnnnnnnnnnnnnnnnnnnnnnnnnnnnnnnnnnnnnnnnnnnnnnnnnnnnnnnnnnnnnnnnnnnnnnnnnnnnnnnnnnnnnnnnnnnnnnnnnnnnnnnnnnnnnnnnnnnnnnnnnnnnnnnnnnnnnnnnnnnnnnnnnnnnnnnnnnnnnnnnnnnnnnnnnnnnnnnnnnnnnnnnnnnnnnnnnnnnnnnnnnnnnnnnnnnnnnnnnnnnnnnnnnnnnnnnnnnnnnnnnnnnnnnnnnnnnnnnnnnnnnnnnnnnnnnnnnnnnnnnnnnnnnnnnnnnnnnnnnnnnnnnnnnnnnnnnnnnnnnnnnnnnnnnnnnnnnnnnnnnnnnnnnnnnnnnnnnnnnnnnnnnnnnnnnnnnnnnnnnnnnnnnnnnnnnnnnnnnnnnnnnnnnnnnnnnnnnnnnnnnnnnnnnnnnnnnnnnnnnnnnnnnnnnnnnnnnnnnnnnnnnnnnnnnnnnnnnnnnnnnnnnnnnnnnnnnnnnnnnnnnnnnnnnnnnnnnnnnnnnnnnnnnnnnnnnnnnnnnnnnnnnnnnnnnnnnnnnnnnnnnnnnnnnnnnnnnnnnnnnnnnnnnnnnnnnnnnnnnnnnnnnnnnnnnnnnnnnnnnnnnnnnnnnnnnnnnnnnnnnnnnnnnnnnnnnnnnnnnnnnnnnnnnnnnnnnnnnnnnnnnnnnnnnnnnnnnnnnnnnnnnnnnnnnnnnnnnnnnnnnnnnnnnnnnnnnnnnnnnnnnnnnnnnnnnnnnnnnnnnnnnnnnnnnnnnnnnnnnnnnnnnnnnnnnnnnnnnnnnnnnnnnnnnnnnnnnnnnnnnnnnnnnnnnnnnnnnnnnnnnnnnnnnnnnnnnnnnnnnnnnnnnnnnnnnnnnnnnnnnnnnnnnnnnnnnnnnnnnnnnnnnnnnnnnnnnnnnnnnnnnnnnnnnnnnnnnnnnnnnnnnnnnnnnnnnnnnnnnnnnnnnnnnnnnnnnnnnnnnnnnnnnnnnnnnnnnnnnnnnnnnnnnnnnnnnnnnnnnnnnnnnnnnnnnnnnnnnnnnnnnnnnnnnnnnnnnnnnnnnnnnnnnnnnnnnnnnnnnnnnnnnnnnnnnnnnnnnnnnnnnnnnnnnnnnnnnnnnnnnnnnnnnnnnnnnnnnnnnnnnnnnnnnnnnnnnnnnnnnnnnnnnnnnnnnnnnnnnnnnnnnnnnnnnnnnnnnnnnnnnnnnnnnnnnnnnnnnnnnnnnnnnnnnnnnnnnnnnnnnnnnnnnnnnnnnnnnnnnnnnnnnnnnnnnnnnnnnnnnnnnnnnnnnnnnnnnnnnnnnnnnnnnnnnnnnnnnnnnnnnnnnnnnnnnnnnnnnnnnnnnnnnnnnnnnnnnnnnnnnnnnnnnnnnnnnnnnnnnnnnnnnnnnnnnnnnnnnnnnnnnnnnnnnnnnnnnnnnnnnnnnnnnnnnnnnnnnnnnnnnnnnnnnnnnnnnnnnnnnnnnnnnnnnnnnnnnnnnnnnnnnnnnnnnnnnnnnnnnnnnnnnnnnnnnnnnnnnnnnnnnnnnnnnnnnnnnnnnnnnnnnnnnnnnnnnnnnnnnnnnnnnnnnnnnnnnnnnnnnnnnnnnnnnnnnnnnnnnnnnnnnnnnnnnnnnnnnnnnnnnnnnnnnnnnnnnnnnnnnnnnnnnnnnnnnnnnnnnnnnnnnnnnnnnnnnnnnnnnnnnnnnnnnnnnnnnnnnnnnnnnnnnnnnnnnnnnnnnnnnnnnnnnnnnnnnnnnnnnnnnnnnnnnnnnnnnnnnnnnnnnnnnnnnnnnnnnnnnnnnnnnnnnnnnnnnnnnnnnnnnnnnnnnnnnnnnnnnnnnnnnnnnnnnnnnnnnnnnnnnnnnnnnnnnnnnnnnnnnnnnnnnnnnnnnnnnnnnnnnnnnnnnnnnnnnnnnnnnnnnnnnnnnnnnnnnnnnnnnnnnnnnnnnnnnnnnnnnnnnnnnnnnnnnnnnnnnnnnnnnnnnnnnnnnnnnnnnnnnnnnnnnnnnnnnnnnnnnnnnnnnnnnnnnnnnnnnnnnnnnnnnnnnnnnnnnnnnnnnnnnnnnnnnnnnnnnnnnnnnnnnnnnnnnnnnnnnnnnnnnnnnnnnnnnnnnnnnnnnnnnnnnnnnnnnnnnnnnnnnnnnnnnnnnnnnnnnnnnnnnnnnnnnnnnnnnnnnnnnnnnnnnnnnnnnnnnnnnnnnnnnnnnnnnnnnnnnnnnnnnnnnnnnnnnnnnnnnnnnnnnnnnnnnnnnnnnnnnnnnnnnnnnnnnnnnnnnnnnnnnnnnnnnnnnnnnnnnnnnnnnnnnnnnnnnnnnnnnnnnnnnnnnnnnnnnnnnnnnnnnnnnnnnnnnnnnnnnnnnnnnnnnnnnnnnnnnnnnnnnnnnnnnnnnnnnnnnnnnnnnnnnnnnnnnnnnnnnnnnnnnnnnnnnnnnnnnnnnnnnnnnnnnnnnnnnnnnnnnnnnnnnnnnnnnnnnnnnnnnnnnnnnnnnnnnnnnnnnnnnnnnnnnnnnnnnnnnnnnnnnnnnnnnnnnnnnnnnnnnnnnnnnnnnnnnnnnnnnnnnnnnnnnnnnnnnnnnnnnnnnnnnnnnnnnnnnnnnnnnnnnnnnnnnnnnnnnnnnnnnnnnnnnnnnnnnnnnnnnnnnnnnnnnnnnnnnnnnnnnnnnnnnnnnnnnnnnnnnnnnnnnnnnnnnnnnnnnnnnnnnnnnnnnnnnnnnnnnnnnnnnnnnnnnnnnnnnnnnnnnnnnnnnnnnnnnnnnnnnnnnnnnnnnnnnnnnnnnnnnnnnnnnnnnnnnnnnnnnnnnnnnnnnnnnnnnnnnnnnnnnnnnnnnnnnnnnnnnnnnnnnnnnnnnnnnnnnnnnnnnnnnnnnnnnnnnnnnnnnnnnnnnnnnnnnnnnnnnnnnnnnnnnnnnnnnnnnnnnnnnnnnnnnnnnnnnnnnnnnnnnnnnnnnnnnnnnnnnnnnnnnnnnnnnnnnnnnnnnnnnnnnnnnnnnnnnnnnnnnnnnnnnnnnnnnnnnnnnnnnnnnnnnnnnnnnnnnnnnnnnnnnnnnnnnnnnnnnnnnnnnnnnnnnnnnnnnnnnnnnnnnnnnnnnnnnnnnnnnnnnnnnnnnnnnnnnnnnnnnnnnnnnnnnnnnnnnnnnnnnnnnnnnnnnnnnnnnnnnnnnnnnnnnnnnnnnnnnnnnnnnnnnnnnnnnnnnnnnnnnnnnnnnnnnnnnnnnnnnnnnnnnnnnnnnnnnnnnnnnnnnnnnnnnnnnnnnnnnnnnnnnnnnnnnnnnnnnnnnnnnnnnnnnnnnnnnnnnnnnnnnnnnnnnnnnnnnnnnnnnnnnnnnnnnnnnnnnnnnnnnnnnnnnnnnnnnnnnnnnnnnnnnnnnnnnnnnnnnnnnnnnnnnnnnnnnnnnnnnnnnnnnnnnnnnnnnnnnnnnnnnnnnnnnnnnnnnnnnnnnnnnnnnnnnnnnnnnnnnnnnnnnnnnnnnnnnnnnnnnnnnnnnnnnnnnnnnnnnnnnnnnnnnnnnnnnnnnnnnnnnnnnnnnnnnnnnnnnnnnnnnnnnnnnnnnnnnnnnnnnnnnnnnnnnnnnnnnnnnnnnnnnnnnnnnnnnnnnnnnnnnnnnnnnnnnnnnnnnnnnnnnnnnnnnnnnnnnnnnnnnnnnnnnnnnnnnnnnnnnnnnnnnnnnnnnnnnnnnnnnnnnnnnnnnnnnnnnnnnnnnnnnnnnnnnnnnnnnnnnnnnnnnnnnnnnnnnnnnnnnnnnnnnnnnnnnnnnnnnnnnnnnnnnnnnnnnnnnnnnnnnnnnnnnnnnnnnnnnnnnnnnnnnnnnnnnnnnnnnnnnnnnnnnnnnnnnnnnnnnnnnnnnnnnnnnnnnnnnnnnnnnnnnnnnnnnnnnnnnnnnnnnnnnnnnnnnnnnnnnnnnnnnnnnnnnnnnnnnnnnnnnnnnnnnnnnnnnnnnnnnnnnnnnnnnnnnnnnnnnnnnnnnnnnnnnnnnnnnnnnnnnnnnnnnnnnnnnnnnnnnnnnnnnnnnnnnnnnnnnnnnnnnnnnnnnnnnnnnnnnnnnnnnnnnnnnnnnnnnnnnnnnnnnnnnnnnnnnnnnnnnnnnnnnnnnnnnnnnnnnnnnnnnnnnnnnnnnnnnnnnnnnnnnnnnnnnnnnnnnnnnnnnnnnnnnnnnnnnnnnnnnnnnnnnnnnnnnnnnnnnnnnnnnnnnnnnnnnnnnnnnnnnnnnnnnnnnnnnnnnnnnnnnnnnnnnnnnnnnnnnnnnnnnnnnnnnnnnnnnnnnnnnnnnnnnnnnnnnnnnnnnnnnnnnnnnnnnnnnnnnnnnnnnnnnnnnnnnnnnnnnnnnnnnnnnnnnnnnnnnnnnnnnnnnnnnnnnnnnnnnnnnnnnnnnnnnnnnnnnnnnnnnnnnnnnnnnnnnnnnnnnnnnnnnnnnnnnnnnnnnnnnnnnnnnnnnnnnnnnnnnnnnnnnnnnnnnnnnnnnnnnnnnnnnnnnnnnnnnnnnnnnnnnnnnnnnnnnnnnnnnnnnnnnnnnnnnnnnnnnnnnnnnnnnnnnnnnnnnnnnnnnnnnnnnnnnnnnnnnnnnnnnnnnnnnnnnnnnnnnnnnnnnnnnnnnnnnnnnnnnnnnnnnnnnnnnnnnnnnnnnnnnnnnnnnnnnnnnnnnnnnnnnnnnnnnnnnnnnnnnnnnnnnnnnnnnnnnnnnnnnnnnnnnnnnnnnnnnnnnnnnnnnnnnnnnnnnnnnnnnnnnnnnnnnnnnnnnnnnnnnnnnnnnnnnnnnnnnnnnnnnnnnnnnnnnnnnnnnnnnnnnnnnnnnnnnnnnnnnnnnnnnnnnnnnnnnnnnnnnnnnnnnnnnnnnnnnnnnnnnnnnnnnnnnnnnnnnnnnnnnnnnnnnnnnnnnnnnnnnnnnnnnnnnnnnnnnnnnnnnnnnnnnnnnnnnnnnnnnnnnnnnnnnnnnnnnnnnnnnnnnnnnnnnnnnnnnnnnnnnnnnnnnnnnnnnnnnnnnnnnnnnnnnnnnnnnnnnnnnnnnnnnnnnnnnnnnnnnnnnnnnnnnnnnnnnnnnnnnnnnnnnnnnnnnnnnnnnnnnnnnnnnnnnnnnnnnnnnnnnnnnnnnnnnnnnnnnnnnnnnnnnnnnnnnnnnnnnnnnnnnnnnnnnnnnnnnnnnnnnnnnnnnnnnnnnnnnnnnnnnnnnnnnnnnnnnnnnnnnnnnnnnnnnnnnnnnnnnnnnnnnnnnnnnnnnnnnnnnnnnnnnnnnnnnnnnnnnnnnnnnnnnnnnnnnnnnnnnnnnnnnnnnnnnnnnnnnnnnnnnnnnnnnnnnnnnnnnnnnnnnnnnnnnnnnnnnnnnnnnnnnnnnnnnnnnnnnnnnnnnnnnnnnnnnnnnnnnnnnnnnnnnnnnnnnnnnnnnnnnnnnnnnnnnnnnnnnnnnnnnnnnnnnnnnnnnnnnnnnnnnnnnnnnnnnnnnnnnnnnnnnnnnnnnnnnnnnnnnnnnnnnnnnnnnnnnnnnnnnnnnnnnnnnnnnnnnnnnnnnnnnnnnnnnnnnnnnnnnnnnnnnnnnnnnnnnnnnnnnnnnnnnnnnnnnnnnnnnnnnnnnnnnnnnnnnnnnnnnnnnnnnnnnnnnnnnnnnnnnnnnnnnnnnnnnnnnnnnnnnnnnnnnnnnnnnnnnnnnnnnnnnnnnnnnnnnnnnnnnnnnnnnnnnnnnnnnnnnnnnnnnnnnnnnnnnnnnnnnnnnnnnnnnnnnnnnnnnnnnnnnnnnnnnnnnnnnnnnnnnnnnnnnnnnnnnnnnnnnnnnnnnnnnnnnnnnnnnnnnnnnnnnnnnnnnnnnnnnnnnnnnnnnnnnnnnnnnnnnnnnnnnnnnnnnnnnnnnnnnnnnnnnnnnnnnnnnnnnnnnnnnnnnnnnnnnnnnnnnnnnnnnnnnnnnnnnnnnnnnnnnnnnnnnnnnnnnnnnnnnnnnnnnnnnnnnnnnnnnnnnnnnnnnnnnnnnnnnnnnnnnnnnnnnnnnnnnnnnnnnnnnnnnnnnnnnnnnnnnnnnnnnnnnnnnnnnnnnnnnnnnnnnnnnnnnnnnnnnnnnnnnnnnnnnnnnnnnnnnnnnnnnnnnnnnnnnnnnnnnnnnnnnnnnnnnnnnnnnnnnnnnnnnnnnnnnnnnnnnnnnnnnnnnnnnnnnnnnnnnnnnnnnnnnnnnnnnnnnnnnnnnnnnnnnnnnnnnnnnnnnnnnnnnnnnnnnnnnnnnnnnnnnnnnnnnnnnnnnnnnnnnnnnnnnnnnnnnnnnnnnnnnnnnnnnnnnnnnnnnnnnnnnnnnnnnnnnnnnnnnnnnnnnnnnnnnnnnnnnnnnnnnnnnnnnnnnnnnnnnnnnnnnnnnnnnnnnnnnnnnnnnnnnnnnnnnnnnnnnnnnnnnnnnnnnnnnnnnnnnnnnnnnnnnnnnnnnnnnnnnnnnnnnnnnnnnnnnnnnnnnnnnnnnnnnnnnnnnnnnnnnnnnnnnnnnnnnnnnnnnnnnnnnnnnnnnnnnnnnnnnnnnnnnnnnnnnnnnnnnnnnnnnnnnnnnnnnnnnnnnnnnnnnnnnnnnnnnnnnnnnnnnnnnnnnnnnnnnnnnnnnnnnnnnnnnnnnnnnnnnnnnnnnnnnnnnnnnnnnnnnnnnnnnnnnnnnnnnnnnnnnnnnnnnnnnnnnnnnnnnnnnnnnnnnnnnnnnnnnnnnnnnnnnnnnnnnnnnnnnnnnnnnnnnnnnnnnnnnnnnnnnnnnnnnnnnnnnnnnnnnnnnnnnnnnnnnnnnnnnnnnnnnnnnnnnnnnnnnnnnnnnnnnnnnnnnnnnnnnnnnnnnnnnnnnnnnnnnnnnnnnnnnnnnnnnnnnnnnnnnnnnnnnnnnnnnnnnnnnnnnnnnnnnnnnnnnnnnnnnnnnnnnnnnnnnnnnnnnnnnnnnnnnnnnnnnnnnnnnnnnnnnnnnnnnnnnnnnnnnnnnnnnnnnnnnnnnnnnnnnnnnnnnnnnnnnnnnnnnnnnnnnnnnnnnnnnnnnnnnnnnnnnnnnnnnnnnnnnnnnnnnnnnnnnnnnnnnnnnnnnnnnnnnnnnnnnnnnnnnnnnnnnnnnnnnnnnnnnnnnnnnnnnnnnnnnnnnnnnnnnnnnnnnnnnnnnnnnnnnnnnnnnnnnnnnnnnnnnnnnnnnnnnnnnnnnnnnnnnnnnnnnnnnnnnnnnnnnnnnnnnnnnnnnnnnnnnnnnnnnnnnnnnnnnnnnnnnnnnnnnnnnnnnnnnnnnnnnnnnnnnnnnnnnnnnnnnnnnnnnnnnnnnnnnnnn

SEQ ID NO: 301569 - RNA, 6644 nt, Homo sapiens
  source 1..6644: mol_type = mRNA
gcagtcaccgccacccaccagctccggcaccaacagcagcgccgctgccaccgcccaccttctgccgccgccaccacagccaccttctcctcctccgctgtcctctcccgtcctcgcctctgtcgactatcaggtgaactttgaaccaggatggctgagccccgccaggagttcgaagtgatggaagatcacgctgggacgtacgggttgggggacaggaaagatcaggggggctacaccatgcaccaagaccaagagggtgacacggacgctggcctgaaagaatctcccctgcagacccccactgaggacggatctgaggaaccgggctctgaaacctctgatgctaagagcactccaacagcggaagatgtgacagcacccttagtggatgagggagctcccggcaagcaggctgccgcgcagccccacacggagatcccagaaggaaccacagctgaagaagcaggcattggagacacccccagcctggaagacgaagctgctggtcacgtgacccaagagcctgaaagtggtaaggtggtccaggaaggcttcctccgagagccaggccccccaggtctgagccaccagctcatgtccggcatgcctggggctcccctcctgcctgagggccccagagaggccacacgccaaccttcggggacaggacctgaggacacagagggcggccgccacgcccctgagctgctcaagcaccagcttctaggagacctgcaccaggaggggccgccgctgaagggggcagggggcaaagagaggccggggagcaaggaggaggtggatgaagaccgcgacgtcgatgagtcctccccccaagactcccctccctccaaggcctccccagcccaagatgggcggcctccccagacagccgccagagaagccaccagcatcccaggcttcccagcggagggtgccatccccctccctgtggatttcctctccaaagtttccacagagatcccagcctcagagcccgacgggcccagtgtagggcgggccaaagggcaggatgcccccctggagttcacgtttcacgtggaaatcacacccaacgtgcagaaggagcaggcgcactcggaggagcatttgggaagggctgcatttccaggggcccctggagaggggccagaggcccggggcccctctttgggagaggacacaaaagaggctgaccttccagagccctctgaaaagcagcctgctgctgctccgcgggggaagcccgtcagccgggtccctcaactcaaagctcgcatggtcagtaaaagcaaagacgggactggaagcgatgacaaaaaagccaagacatccacacgttcctctgctaaaaccttgaaaaataggccttgccttagccccaaacaccccactcctggtagctcagaccctctgatccaaccctccagccctgctgtgtgcccagagccaccttcctctcctaaatacgtctcttctgtcacttcccgaactggcagttctggagcaaaggagatgaaactcaagggggctgatggtaaaacgaagatcgccacaccgcggggagcagcccctccaggccagaagggccaggccaacgccaccaggattccagcaaaaaccccgcccgctccaaagacaccacccagctctgcgactaagcaagtccagagaagaccaccccctgcagggcccagatctgagagaggtgaacctccaaaatcaggggatcgcagcggctacagcagccccggctccccaggcactcccggcagccgctcccgcaccccgtcccttccaaccccacccacccgggagcccaagaaggtggcagtggtccgtactccacccaagtcgccgtcttccgccaagagccgcctgcagacagcccccgtgcccatgccagacctgaagaatgtcaagtccaagatcggctccactgagaacctgaagcaccagccgggaggcgggaaggtgcagataattaataagaagctggatcttagcaacgtccagtccaagtgtggctcaaaggataatatcaaacacgtcccgggaggcggcagtgtgcaaatagtctacaaaccagttgacctgagcaaggtgacctccaagtgtggctcattaggcaacatccatcataaaccaggaggtggccaggtggaagtaaaatctgagaagcttgacttcaaggacagagtccagtcgaagattgggtccctggacaatatcacccacgtccctggcggaggaaataaaaagattgaaacccacaagctgaccttccgcgagaacgccaaagccaagacagaccacggggcggagatcgtgtacaagtcgccagtggtgtctggggacacgtctccacggcatctcagcaatgtctcctccaccggcagcatcgacatggtagactcgccccagctcgccacgctagctgacgaggtgtctgcctccctggccaagcagggtttgtgatcaggcccctggggcggtcaataattgtggagaggagagaatgagagagtgtggaaaaaaaaagaataatgacccggcccccgccctctgcccccagctgctcctcgcagttcggttaattggttaatcacttaacctgcttttgtcactcggctttggctcgggacttcaaaatcagtgatgggagtaagagcaaatttcatctttccaaattgatgggtgggctagtaataaaatatttaaaaaaaaacattcaaaaacatggccacatccaacatttcctcaggcaattccttttgattcttttttcttccccctccatgtagaagagggagaaggagaggctctgaaagctgcttctgggggatttcaagggactgggggtgccaaccacctctggccctgttgtgggggtgtcacagaggcagtggcagcaacaaaggatttgaaacttggtgtgttcgtggagccacaggcagacgatgtcaaccttgtgtgagtgtgacgggggttggggtggggcgggaggccacgggggaggccgaggcaggggctgggcagaggggagaggaagcacaagaagtgggagtgggagaggaagccacgtgctggagagtagacatccccctccttgccgctgggagagccaaggcctatgccacctgcagcgtctgagcggccgcctgtccttggtggccgggggtgggggcctgctgtgggtcagtgtgccaccctctgcagggcagcctgtgggagaagggacagcgggtaaaaagagaaggcaagctggcaggagggtggcacttcgtggatgacctccttagaaaagactgaccttgatgtcttgagagcgctggcctcttcctccctccctgcagggtagggggcctgagttgaggggcttccctctgctccacagaaaccctgttttattgagttctgaaggttggaactgctgccatgattttggccactttgcagacctgggactttagggctaaccagttctctttgtaaggacttgtgcctcttgggagacgtccacccgtttccaagcctgggccactggcatctctggagtgtgtgggggtctgggaggcaggtcccgagccccctgtccttcccacggccactgcagtcaccccgtctgcgccgctgtgctgttgtctgccgtgagagcccaatcactgcctatacccctcatcacacgtcacaatgtcccgaattcccagcctcaccaccccttctcagtaatgaccctggttggttgcaggaggtacctactccatactgagggtgaaattaagggaaggcaaagtccaggcacaagagtgggaccccagcctctcactctcagttccactcatccaactgggaccctcaccacgaatctcatgatctgattcggttccctgtctcctcctcccgtcacagatgtgagccagggcactgctcagctgtgaccctaggtgtttctgccttgttgacatggagagagccctttcccctgagaaggcctggccccttcctgtgctgagcccacagcagcaggctgggtgtcttggttgtcagtggtggcaccaggatggaagggcaaggcacccagggcaggcccacagtcccgctgtcccccacttgcaccctagcttgtagctgccaacctcccagacagcccagcccgctgctcagctccacatgcatagtatcagccctccacacccgacaaaggggaacacacccccttggaaatggttcttttcccccagtcccagctggaagccatgctgtctgttctgctggagcagctgaacatatacatagatgttgccctgccctccccatctgcaccctgttgagttgtagttggatttgtctgtttatgcttggattcaccagagtgactatgatagtgaaaagaaaaaaaaaaaaaaaaaaggacgcatgtatcttgaaatgcttgtaaagaggtttctaacccaccctcacgaggtgtctctcacccccacactgggactcgtgtggcctgtgtggtgccaccctgctggggcctcccaagttttgaaaggctttcctcagcacctgggacccaacagagaccagcttctagcagctaaggaggccgttcagctgtgacgaaggcctgaagcacaggattaggactgaagcgatgatgtccccttccctacttccccttggggctccctgtgtcagggcacagactaggtcttgtggctggtctggcttgcggcgcgaggatggttctctctggtcatagcccgaagtctcatggcagtcccaaaggaggcttacaactcctgcatcacaagaaaaaggaagccactgccagctggggggatctgcagctcccagaagctccgtgagcctcagccacccctcagactgggttcctctccaagctcgccctctggaggggcagcgcagcctcccaccaagggccctgcgaccacagcagggattgggatgaattgcctgtcctggatctgctctagaggcccaagctgcctgcctgaggaaggatgacttgacaagtcaggagacactgttcccaaagccttgaccagagcacctcagcccgctgaccttgcacaaactccatctgctgccatgagaaaagggaagccgcctttgcaaaacattgctgcctaaagaaactcagcagcctcaggcccaattctgccacttctggtttgggtacagttaaaggcaaccctgagggacttggcagtagaaatccagggcctcccctggggctggcagcttcgtgtgcagctagagctttacctgaaaggaagtctctgggcccagaactctccaccaagagcctccctgccgttcgctgagtcccagcaattctcctaagttgaagggatctgagaaggagaaggaaatgtggggtagatttggtggtggttagagatatgcccccctcattactgccaacagtttcggctgcatttcttcacgcacctcggttcctcttcctgaagttcttgtgccctgctcttcagcaccatgggccttcttatacggaaggctctgggatctcccccttgtggggcaggctcttggggccagcctaagatcatggtttagggtgatcagtgctggcagataaattgaaaaggcacgctggcttgtgatcttaaatgaggacaatccccccagggctgggcactcctcccctcccctcacttctcccacctgcagagccagtgtccttgggtgggctagataggatatactgtatgccggctccttcaagctgctgactcactttatcaatagttccatttaaattgacttcagtggtgagactgtatcctgtttgctattgcttgttgtgctatggggggaggggggaggaatgtgtaagatagttaacatgggcaaagggagatcttggggtgcagcacttaaactgcctcgtaacccttttcatgatttcaaccacatttgctagagggagggagcagccacggagttagaggcccttggggtttctcttttccactgacaggctttcccaggcagctggctagttcattccctccccagccaggtgcaggcgtaggaatatggacatctggttgctttggcctgctgccctctttcaggggtcctaagcccacaatcatgcctccctaagaccttggcatccttccctctaagccgttggcacctctgtgccacctctcacactggctccagacacacagcctgtgcttttggagctgagatcactcgcttcaccctcctcatctttgttctccaagtaaagccacgaggtcggggcgagggcagaggtgatcacctgcgtgtcccatctacagacctgcagcttcataaaacttctgatttctcttcagctttgaaaagggttaccctgggcactggcctagagcctcacctcctaatagacttagccccatgagtttgccatgttgagcaggactatttctggcacttgcaagtcccatgatttcttcggtaattctgagggtggggggagggacatgaaatcatcttagcttagctttctgtctgtgaatgtctatatagtgtattgtgtgttttaacaaatgatttacactgactgttgctgtaaaagtgaatttggaaataaagttattactctgattaaa

SEQ ID NO: 301570 - RNA, 5552 nt, Homo sapiens
  source 1..5552: mol_type = mRNA
gcagtcaccgccacccaccagctccggcaccaacagcagcgccgctgccaccgcccaccttctgccgccgccaccacagccaccttctcctcctccgctgtcctctcccgtcctcgcctctgtcgactatcaggtgaactttgaaccaggatggctgagccccgccaggagttcgaagtgatggaagatcacgctgggacgtacgggttgggggacaggaaagatcaggggggctacaccatgcaccaagaccaagagggtgacacggacgctggcctgaaagaatctcccctgcagacccccactgaggacggatctgaggaaccgggctctgaaacctctgatgctaagagcactccaacagcggaagctgaagaagcaggcattggagacacccccagcctggaagacgaagctgctggtcacgtgacccaagctcgcatggtcagtaaaagcaaagacgggactggaagcgatgacaaaaaagccaagggggctgatggtaaaacgaagatcgccacaccgcggggagcagcccctccaggccagaagggccaggccaacgccaccaggattccagcaaaaaccccgcccgctccaaagacaccacccagctctggtgaacctccaaaatcaggggatcgcagcggctacagcagccccggctccccaggcactcccggcagccgctcccgcaccccgtcccttccaaccccacccacccgggagcccaagaaggtggcagtggtccgtactccacccaagtcgccgtcttccgccaagagccgcctgcagacagcccccgtgcccatgccagacctgaagaatgtcaagtccaagatcggctccactgagaacctgaagcaccagccgggaggcgggaaggtgcagataattaataagaagctggatcttagcaacgtccagtccaagtgtggctcaaaggataatatcaaacacgtcccgggaggcggcagtgtgcaaatagtctacaaaccagttgacctgagcaaggtgacctccaagtgtggctcattaggcaacatccatcataaaccaggaggtggccaggtggaagtaaaatctgagaagcttgacttcaaggacagagtccagtcgaagattgggtccctggacaatatcacccacgtccctggcggaggaaataaaaagattgaaacccacaagctgaccttccgcgagaacgccaaagccaagacagaccacggggcggagatcgtgtacaagtcgccagtggtgtctggggacacgtctccacggcatctcagcaatgtctcctccaccggcagcatcgacatggtagactcgccccagctcgccacgctagctgacgaggtgtctgcctccctggccaagcagggtttgtgatcaggcccctggggcggtcaataattgtggagaggagagaatgagagagtgtggaaaaaaaaagaataatgacccggcccccgccctctgcccccagctgctcctcgcagttcggttaattggttaatcacttaacctgcttttgtcactcggctttggctcgggacttcaaaatcagtgatgggagtaagagcaaatttcatctttccaaattgatgggtgggctagtaataaaatatttaaaaaaaaacattcaaaaacatggccacatccaacatttcctcaggcaattccttttgattcttttttcttccccctccatgtagaagagggagaaggagaggctctgaaagctgcttctgggggatttcaagggactgggggtgccaaccacctctggccctgttgtgggggtgtcacagaggcagtggcagcaacaaaggatttgaaacttggtgtgttcgtggagccacaggcagacgatgtcaaccttgtgtgagtgtgacgggggttggggtggggcgggaggccacgggggaggccgaggcaggggctgggcagaggggagaggaagcacaagaagtgggagtgggagaggaagccacgtgctggagagtagacatccccctccttgccgctgggagagccaaggcctatgccacctgcagcgtctgagcggccgcctgtccttggtggccgggggtgggggcctgctgtgggtcagtgtgccaccctctgcagggcagcctgtgggagaagggacagcgggtaaaaagagaaggcaagctggcaggagggtggcacttcgtggatgacctccttagaaaagactgaccttgatgtcttgagagcgctggcctcttcctccctccctgcagggtagggggcctgagttgaggggcttccctctgctccacagaaaccctgttttattgagttctgaaggttggaactgctgccatgattttggccactttgcagacctgggactttagggctaaccagttctctttgtaaggacttgtgcctcttgggagacgtccacccgtttccaagcctgggccactggcatctctggagtgtgtgggggtctgggaggcaggtcccgagccccctgtccttcccacggccactgcagtcaccccgtctgcgccgctgtgctgttgtctgccgtgagagcccaatcactgcctatacccctcatcacacgtcacaatgtcccgaattcccagcctcaccaccccttctcagtaatgaccctggttggttgcaggaggtacctactccatactgagggtgaaattaagggaaggcaaagtccaggcacaagagtgggaccccagcctctcactctcagttccactcatccaactgggaccctcaccacgaatctcatgatctgattcggttccctgtctcctcctcccgtcacagatgtgagccagggcactgctcagctgtgaccctaggtgtttctgccttgttgacatggagagagccctttcccctgagaaggcctggccccttcctgtgctgagcccacagcagcaggctgggtgtcttggttgtcagtggtggcaccaggatggaagggcaaggcacccagggcaggcccacagtcccgctgtcccccacttgcaccctagcttgtagctgccaacctcccagacagcccagcccgctgctcagctccacatgcatagtatcagccctccacacccgacaaaggggaacacacccccttggaaatggttcttttcccccagtcccagctggaagccatgctgtctgttctgctggagcagctgaacatatacatagatgttgccctgccctccccatctgcaccctgttgagttgtagttggatttgtctgtttatgcttggattcaccagagtgactatgatagtgaaaagaaaaaaaaaaaaaaaaaaggacgcatgtatcttgaaatgcttgtaaagaggtttctaacccaccctcacgaggtgtctctcacccccacactgggactcgtgtggcctgtgtggtgccaccctgctggggcctcccaagttttgaaaggctttcctcagcacctgggacccaacagagaccagcttctagcagctaaggaggccgttcagctgtgacgaaggcctgaagcacaggattaggactgaagcgatgatgtccccttccctacttccccttggggctccctgtgtcagggcacagactaggtcttgtggctggtctggcttgcggcgcgaggatggttctctctggtcatagcccgaagtctcatggcagtcccaaaggaggcttacaactcctgcatcacaagaaaaaggaagccactgccagctggggggatctgcagctcccagaagctccgtgagcctcagccacccctcagactgggttcctctccaagctcgccctctggaggggcagcgcagcctcccaccaagggccctgcgaccacagcagggattgggatgaattgcctgtcctggatctgctctagaggcccaagctgcctgcctgaggaaggatgacttgacaagtcaggagacactgttcccaaagccttgaccagagcacctcagcccgctgaccttgcacaaactccatctgctgccatgagaaaagggaagccgcctttgcaaaacattgctgcctaaagaaactcagcagcctcaggcccaattctgccacttctggtttgggtacagttaaaggcaaccctgagggacttggcagtagaaatccagggcctcccctggggctggcagcttcgtgtgcagctagagctttacctgaaaggaagtctctgggcccagaactctccaccaagagcctccctgccgttcgctgagtcccagcaattctcctaagttgaagggatctgagaaggagaaggaaatgtggggtagatttggtggtggttagagatatgcccccctcattactgccaacagtttcggctgcatttcttcacgcacctcggttcctcttcctgaagttcttgtgccctgctcttcagcaccatgggccttcttatacggaaggctctgggatctcccccttgtggggcaggctcttggggccagcctaagatcatggtttagggtgatcagtgctggcagataaattgaaaaggcacgctggcttgtgatcttaaatgaggacaatccccccagggctgggcactcctcccctcccctcacttctcccacctgcagagccagtgtccttgggtgggctagataggatatactgtatgccggctccttcaagctgctgactcactttatcaatagttccatttaaattgacttcagtggtgagactgtatcctgtttgctattgcttgttgtgctatggggggaggggggaggaatgtgtaagatagttaacatgggcaaagggagatcttggggtgcagcacttaaactgcctcgtaacccttttcatgatttcaaccacatttgctagagggagggagcagccacggagttagaggcccttggggtttctcttttccactgacaggctttcccaggcagctggctagttcattccctccccagccaggtgcaggcgtaggaatatggacatctggttgctttggcctgctgccctctttcaggggtcctaagcccacaatcatgcctccctaagaccttggcatccttccctctaagccgttggcacctctgtgccacctctcacactggctccagacacacagcctgtgcttttggagctgagatcactcgcttcaccctcctcatctttgttctccaagtaaagccacgaggtcggggcgagggcagaggtgatcacctgcgtgtcccatctacagacctgcagcttcataaaacttctgatttctcttcagctttgaaaagggttaccctgggcactggcctagagcctcacctcctaatagacttagccccatgagtttgccatgttgagcaggactatttctggcacttgcaagtcccatgatttcttcggtaattctgagggtggggggagggacatgaaatcatcttagcttagctttctgtctgtgaatgtctatatagtgtattgtgtgttttaacaaatgatttacactgactgttgctgtaaaagtgaatttggaaataaagttattactctgattaaa

SEQ ID NO: 301571 - RNA, 5459 nt, Homo sapiens
  source 1..5459: mol_type = mRNA
gcagtcaccgccacccaccagctccggcaccaacagcagcgccgctgccaccgcccaccttctgccgccgccaccacagccaccttctcctcctccgctgtcctctcccgtcctcgcctctgtcgactatcaggtgaactttgaaccaggatggctgagccccgccaggagttcgaagtgatggaagatcacgctgggacgtacgggttgggggacaggaaagatcaggggggctacaccatgcaccaagaccaagagggtgacacggacgctggcctgaaagaatctcccctgcagacccccactgaggacggatctgaggaaccgggctctgaaacctctgatgctaagagcactccaacagcggaagctgaagaagcaggcattggagacacccccagcctggaagacgaagctgctggtcacgtgacccaagctcgcatggtcagtaaaagcaaagacgggactggaagcgatgacaaaaaagccaagggggctgatggtaaaacgaagatcgccacaccgcggggagcagcccctccaggccagaagggccaggccaacgccaccaggattccagcaaaaaccccgcccgctccaaagacaccacccagctctggtgaacctccaaaatcaggggatcgcagcggctacagcagccccggctccccaggcactcccggcagccgctcccgcaccccgtcccttccaaccccacccacccgggagcccaagaaggtggcagtggtccgtactccacccaagtcgccgtcttccgccaagagccgcctgcagacagcccccgtgcccatgccagacctgaagaatgtcaagtccaagatcggctccactgagaacctgaagcaccagccgggaggcgggaaggtgcaaatagtctacaaaccagttgacctgagcaaggtgacctccaagtgtggctcattaggcaacatccatcataaaccaggaggtggccaggtggaagtaaaatctgagaagcttgacttcaaggacagagtccagtcgaagattgggtccctggacaatatcacccacgtccctggcggaggaaataaaaagattgaaacccacaagctgaccttccgcgagaacgccaaagccaagacagaccacggggcggagatcgtgtacaagtcgccagtggtgtctggggacacgtctccacggcatctcagcaatgtctcctccaccggcagcatcgacatggtagactcgccccagctcgccacgctagctgacgaggtgtctgcctccctggccaagcagggtttgtgatcaggcccctggggcggtcaataattgtggagaggagagaatgagagagtgtggaaaaaaaaagaataatgacccggcccccgccctctgcccccagctgctcctcgcagttcggttaattggttaatcacttaacctgcttttgtcactcggctttggctcgggacttcaaaatcagtgatgggagtaagagcaaatttcatctttccaaattgatgggtgggctagtaataaaatatttaaaaaaaaacattcaaaaacatggccacatccaacatttcctcaggcaattccttttgattcttttttcttccccctccatgtagaagagggagaaggagaggctctgaaagctgcttctgggggatttcaagggactgggggtgccaaccacctctggccctgttgtgggggtgtcacagaggcagtggcagcaacaaaggatttgaaacttggtgtgttcgtggagccacaggcagacgatgtcaaccttgtgtgagtgtgacgggggttggggtggggcgggaggccacgggggaggccgaggcaggggctgggcagaggggagaggaagcacaagaagtgggagtgggagaggaagccacgtgctggagagtagacatccccctccttgccgctgggagagccaaggcctatgccacctgcagcgtctgagcggccgcctgtccttggtggccgggggtgggggcctgctgtgggtcagtgtgccaccctctgcagggcagcctgtgggagaagggacagcgggtaaaaagagaaggcaagctggcaggagggtggcacttcgtggatgacctccttagaaaagactgaccttgatgtcttgagagcgctggcctcttcctccctccctgcagggtagggggcctgagttgaggggcttccctctgctccacagaaaccctgttttattgagttctgaaggttggaactgctgccatgattttggccactttgcagacctgggactttagggctaaccagttctctttgtaaggacttgtgcctcttgggagacgtccacccgtttccaagcctgggccactggcatctctggagtgtgtgggggtctgggaggcaggtcccgagccccctgtccttcccacggccactgcagtcaccccgtctgcgccgctgtgctgttgtctgccgtgagagcccaatcactgcctatacccctcatcacacgtcacaatgtcccgaattcccagcctcaccaccccttctcagtaatgaccctggttggttgcaggaggtacctactccatactgagggtgaaattaagggaaggcaaagtccaggcacaagagtgggaccccagcctctcactctcagttccactcatccaactgggaccctcaccacgaatctcatgatctgattcggttccctgtctcctcctcccgtcacagatgtgagccagggcactgctcagctgtgaccctaggtgtttctgccttgttgacatggagagagccctttcccctgagaaggcctggccccttcctgtgctgagcccacagcagcaggctgggtgtcttggttgtcagtggtggcaccaggatggaagggcaaggcacccagggcaggcccacagtcccgctgtcccccacttgcaccctagcttgtagctgccaacctcccagacagcccagcccgctgctcagctccacatgcatagtatcagccctccacacccgacaaaggggaacacacccccttggaaatggttcttttcccccagtcccagctggaagccatgctgtctgttctgctggagcagctgaacatatacatagatgttgccctgccctccccatctgcaccctgttgagttgtagttggatttgtctgtttatgcttggattcaccagagtgactatgatagtgaaaagaaaaaaaaaaaaaaaaaaggacgcatgtatcttgaaatgcttgtaaagaggtttctaacccaccctcacgaggtgtctctcacccccacactgggactcgtgtggcctgtgtggtgccaccctgctggggcctcccaagttttgaaaggctttcctcagcacctgggacccaacagagaccagcttctagcagctaaggaggccgttcagctgtgacgaaggcctgaagcacaggattaggactgaagcgatgatgtccccttccctacttccccttggggctccctgtgtcagggcacagactaggtcttgtggctggtctggcttgcggcgcgaggatggttctctctggtcatagcccgaagtctcatggcagtcccaaaggaggcttacaactcctgcatcacaagaaaaaggaagccactgccagctggggggatctgcagctcccagaagctccgtgagcctcagccacccctcagactgggttcctctccaagctcgccctctggaggggcagcgcagcctcccaccaagggccctgcgaccacagcagggattgggatgaattgcctgtcctggatctgctctagaggcccaagctgcctgcctgaggaaggatgacttgacaagtcaggagacactgttcccaaagccttgaccagagcacctcagcccgctgaccttgcacaaactccatctgctgccatgagaaaagggaagccgcctttgcaaaacattgctgcctaaagaaactcagcagcctcaggcccaattctgccacttctggtttgggtacagttaaaggcaaccctgagggacttggcagtagaaatccagggcctcccctggggctggcagcttcgtgtgcagctagagctttacctgaaaggaagtctctgggcccagaactctccaccaagagcctccctgccgttcgctgagtcccagcaattctcctaagttgaagggatctgagaaggagaaggaaatgtggggtagatttggtggtggttagagatatgcccccctcattactgccaacagtttcggctgcatttcttcacgcacctcggttcctcttcctgaagttcttgtgccctgctcttcagcaccatgggccttcttatacggaaggctctgggatctcccccttgtggggcaggctcttggggccagcctaagatcatggtttagggtgatcagtgctggcagataaattgaaaaggcacgctggcttgtgatcttaaatgaggacaatccccccagggctgggcactcctcccctcccctcacttctcccacctgcagagccagtgtccttgggtgggctagataggatatactgtatgccggctccttcaagctgctgactcactttatcaatagttccatttaaattgacttcagtggtgagactgtatcctgtttgctattgcttgttgtgctatggggggaggggggaggaatgtgtaagatagttaacatgggcaaagggagatcttggggtgcagcacttaaactgcctcgtaacccttttcatgatttcaaccacatttgctagagggagggagcagccacggagttagaggcccttggggtttctcttttccactgacaggctttcccaggcagctggctagttcattccctccccagccaggtgcaggcgtaggaatatggacatctggttgctttggcctgctgccctctttcaggggtcctaagcccacaatcatgcctccctaagaccttggcatccttccctctaagccgttggcacctctgtgccacctctcacactggctccagacacacagcctgtgcttttggagctgagatcactcgcttcaccctcctcatctttgttctccaagtaaagccacgaggtcggggcgagggcagaggtgatcacctgcgtgtcccatctacagacctgcagcttcataaaacttctgatttctcttcagctttgaaaagggttaccctgggcactggcctagagcctcacctcctaatagacttagccccatgagtttgccatgttgagcaggactatttctggcacttgcaagtcccatgatttcttcggtaattctgagggtggggggagggacatgaaatcatcttagcttagctttctgtctgtgaatgtctatatagtgtattgtgtgttttaacaaatgatttacactgactgttgctgtaaaagtgaatttggaaataaagttattactctgattaaa

SEQ ID NO: 301572 - RNA, 5546 nt, Homo sapiens
  source 1..5546: mol_type = mRNA
gcagtcaccgccacccaccagctccggcaccaacagcagcgccgctgccaccgcccaccttctgccgccgccaccacagccaccttctcctcctccgctgtcctctcccgtcctcgcctctgtcgactatcaggtgaactttgaaccaggatggctgagccccgccaggagttcgaagtgatggaagatcacgctgggacgtacgggttgggggacaggaaagatcaggggggctacaccatgcaccaagaccaagagggtgacacggacgctggcctgaaagaatctcccctgcagacccccactgaggacggatctgaggaaccgggctctgaaacctctgatgctaagagcactccaacagcggaagatgtgacagcacccttagtggatgagggagctcccggcaagcaggctgccgcgcagccccacacggagatcccagaaggaaccacagctgaagaagcaggcattggagacacccccagcctggaagacgaagctgctggtcacgtgacccaagctcgcatggtcagtaaaagcaaagacgggactggaagcgatgacaaaaaagccaagggggctgatggtaaaacgaagatcgccacaccgcggggagcagcccctccaggccagaagggccaggccaacgccaccaggattccagcaaaaaccccgcccgctccaaagacaccacccagctctggtgaacctccaaaatcaggggatcgcagcggctacagcagccccggctccccaggcactcccggcagccgctcccgcaccccgtcccttccaaccccacccacccgggagcccaagaaggtggcagtggtccgtactccacccaagtcgccgtcttccgccaagagccgcctgcagacagcccccgtgcccatgccagacctgaagaatgtcaagtccaagatcggctccactgagaacctgaagcaccagccgggaggcgggaaggtgcaaatagtctacaaaccagttgacctgagcaaggtgacctccaagtgtggctcattaggcaacatccatcataaaccaggaggtggccaggtggaagtaaaatctgagaagcttgacttcaaggacagagtccagtcgaagattgggtccctggacaatatcacccacgtccctggcggaggaaataaaaagattgaaacccacaagctgaccttccgcgagaacgccaaagccaagacagaccacggggcggagatcgtgtacaagtcgccagtggtgtctggggacacgtctccacggcatctcagcaatgtctcctccaccggcagcatcgacatggtagactcgccccagctcgccacgctagctgacgaggtgtctgcctccctggccaagcagggtttgtgatcaggcccctggggcggtcaataattgtggagaggagagaatgagagagtgtggaaaaaaaaagaataatgacccggcccccgccctctgcccccagctgctcctcgcagttcggttaattggttaatcacttaacctgcttttgtcactcggctttggctcgggacttcaaaatcagtgatgggagtaagagcaaatttcatctttccaaattgatgggtgggctagtaataaaatatttaaaaaaaaacattcaaaaacatggccacatccaacatttcctcaggcaattccttttgattcttttttcttccccctccatgtagaagagggagaaggagaggctctgaaagctgcttctgggggatttcaagggactgggggtgccaaccacctctggccctgttgtgggggtgtcacagaggcagtggcagcaacaaaggatttgaaacttggtgtgttcgtggagccacaggcagacgatgtcaaccttgtgtgagtgtgacgggggttggggtggggcgggaggccacgggggaggccgaggcaggggctgggcagaggggagaggaagcacaagaagtgggagtgggagaggaagccacgtgctggagagtagacatccccctccttgccgctgggagagccaaggcctatgccacctgcagcgtctgagcggccgcctgtccttggtggccgggggtgggggcctgctgtgggtcagtgtgccaccctctgcagggcagcctgtgggagaagggacagcgggtaaaaagagaaggcaagctggcaggagggtggcacttcgtggatgacctccttagaaaagactgaccttgatgtcttgagagcgctggcctcttcctccctccctgcagggtagggggcctgagttgaggggcttccctctgctccacagaaaccctgttttattgagttctgaaggttggaactgctgccatgattttggccactttgcagacctgggactttagggctaaccagttctctttgtaaggacttgtgcctcttgggagacgtccacccgtttccaagcctgggccactggcatctctggagtgtgtgggggtctgggaggcaggtcccgagccccctgtccttcccacggccactgcagtcaccccgtctgcgccgctgtgctgttgtctgccgtgagagcccaatcactgcctatacccctcatcacacgtcacaatgtcccgaattcccagcctcaccaccccttctcagtaatgaccctggttggttgcaggaggtacctactccatactgagggtgaaattaagggaaggcaaagtccaggcacaagagtgggaccccagcctctcactctcagttccactcatccaactgggaccctcaccacgaatctcatgatctgattcggttccctgtctcctcctcccgtcacagatgtgagccagggcactgctcagctgtgaccctaggtgtttctgccttgttgacatggagagagccctttcccctgagaaggcctggccccttcctgtgctgagcccacagcagcaggctgggtgtcttggttgtcagtggtggcaccaggatggaagggcaaggcacccagggcaggcccacagtcccgctgtcccccacttgcaccctagcttgtagctgccaacctcccagacagcccagcccgctgctcagctccacatgcatagtatcagccctccacacccgacaaaggggaacacacccccttggaaatggttcttttcccccagtcccagctggaagccatgctgtctgttctgctggagcagctgaacatatacatagatgttgccctgccctccccatctgcaccctgttgagttgtagttggatttgtctgtttatgcttggattcaccagagtgactatgatagtgaaaagaaaaaaaaaaaaaaaaaaggacgcatgtatcttgaaatgcttgtaaagaggtttctaacccaccctcacgaggtgtctctcacccccacactgggactcgtgtggcctgtgtggtgccaccctgctggggcctcccaagttttgaaaggctttcctcagcacctgggacccaacagagaccagcttctagcagctaaggaggccgttcagctgtgacgaaggcctgaagcacaggattaggactgaagcgatgatgtccccttccctacttccccttggggctccctgtgtcagggcacagactaggtcttgtggctggtctggcttgcggcgcgaggatggttctctctggtcatagcccgaagtctcatggcagtcccaaaggaggcttacaactcctgcatcacaagaaaaaggaagccactgccagctggggggatctgcagctcccagaagctccgtgagcctcagccacccctcagactgggttcctctccaagctcgccctctggaggggcagcgcagcctcccaccaagggccctgcgaccacagcagggattgggatgaattgcctgtcctggatctgctctagaggcccaagctgcctgcctgaggaaggatgacttgacaagtcaggagacactgttcccaaagccttgaccagagcacctcagcccgctgaccttgcacaaactccatctgctgccatgagaaaagggaagccgcctttgcaaaacattgctgcctaaagaaactcagcagcctcaggcccaattctgccacttctggtttgggtacagttaaaggcaaccctgagggacttggcagtagaaatccagggcctcccctggggctggcagcttcgtgtgcagctagagctttacctgaaaggaagtctctgggcccagaactctccaccaagagcctccctgccgttcgctgagtcccagcaattctcctaagttgaagggatctgagaaggagaaggaaatgtggggtagatttggtggtggttagagatatgcccccctcattactgccaacagtttcggctgcatttcttcacgcacctcggttcctcttcctgaagttcttgtgccctgctcttcagcaccatgggccttcttatacggaaggctctgggatctcccccttgtggggcaggctcttggggccagcctaagatcatggtttagggtgatcagtgctggcagataaattgaaaaggcacgctggcttgtgatcttaaatgaggacaatccccccagggctgggcactcctcccctcccctcacttctcccacctgcagagccagtgtccttgggtgggctagataggatatactgtatgccggctccttcaagctgctgactcactttatcaatagttccatttaaattgacttcagtggtgagactgtatcctgtttgctattgcttgttgtgctatggggggaggggggaggaatgtgtaagatagttaacatgggcaaagggagatcttggggtgcagcacttaaactgcctcgtaacccttttcatgatttcaaccacatttgctagagggagggagcagccacggagttagaggcccttggggtttctcttttccactgacaggctttcccaggcagctggctagttcattccctccccagccaggtgcaggcgtaggaatatggacatctggttgctttggcctgctgccctctttcaggggtcctaagcccacaatcatgcctccctaagaccttggcatccttccctctaagccgttggcacctctgtgccacctctcacactggctccagacacacagcctgtgcttttggagctgagatcactcgcttcaccctcctcatctttgttctccaagtaaagccacgaggtcggggcgagggcagaggtgatcacctgcgtgtcccatctacagacctgcagcttcataaaacttctgatttctcttcagctttgaaaagggttaccctgggcactggcctagagcctcacctcctaatagacttagccccatgagtttgccatgttgagcaggactatttctggcacttgcaagtcccatgatttcttcggtaattctgagggtggggggagggacatgaaatcatcttagcttagctttctgtctgtgaatgtctatatagtgtattgtgtgttttaacaaatgatttacactgactgttgctgtaaaagtgaatttggaaataaagttattactctgattaaa

SEQ ID NO: 301573 - RNA, 6815 nt, Homo sapiens
  source 1..6815: mol_type = mRNA
gcagtcaccgccacccaccagctccggcaccaacagcagcgccgctgccaccgcccaccttctgccgccgccaccacagccaccttctcctcctccgctgtcctctcccgtcctcgcctctgtcgactatcaggtgaactttgaaccaggatggctgagccccgccaggagttcgaagtgatggaagatcacgctgggacgtacgggttgggggacaggaaagatcaggggggctacaccatgcaccaagaccaagagggtgacacggacgctggcctgaaagaatctcccctgcagacccccactgaggacggatctgaggaaccgggctctgaaacctctgatgctaagagcactccaacagcggaagctgaagaagcaggcattggagacacccccagcctggaagacgaagctgctggtcacgtgacccaagaggagttgagagttccgggccggcagaggaaggcgcctgaaaggcccctggccaatgagattagcgcccacgtccagcctggaccctgcggagaggcctctggggtctctgggccgtgcctcggggagaaagagccagaagctcccgtcccgctgaccgcgagccttcctcagcaccgtcccgtttgcccagcgcctcctccaacaggaggccctcaggagccctccctggagtggggacaaaaaggcggggactgggccgagaagggtccggcctttccgaagcccgccaccactgcgtatctccacacagagcctgaaagtggtaaggtggtccaggaaggcttcctccgagagccaggccccccaggtctgagccaccagctcatgtccggcatgcctggggctcccctcctgcctgagggccccagagaggccacacgccaaccttcggggacaggacctgaggacacagagggcggccgccacgcccctgagctgctcaagcaccagcttctaggagacctgcaccaggaggggccgccgctgaagggggcagggggcaaagagaggccggggagcaaggaggaggtggatgaagaccgcgacgtcgatgagtcctccccccaagactcccctccctccaaggcctccccagcccaagatgggcggcctccccagacagccgccagagaagccaccagcatcccaggcttcccagcggagggtgccatccccctccctgtggatttcctctccaaagtttccacagagatcccagcctcagagcccgacgggcccagtgtagggcgggccaaagggcaggatgcccccctggagttcacgtttcacgtggaaatcacacccaacgtgcagaaggagcaggcgcactcggaggagcatttgggaagggctgcatttccaggggcccctggagaggggccagaggcccggggcccctctttgggagaggacacaaaagaggctgaccttccagagccctctgaaaagcagcctgctgctgctccgcgggggaagcccgtcagccgggtccctcaactcaaagctcgcatggtcagtaaaagcaaagacgggactggaagcgatgacaaaaaagccaagacatccacacgttcctctgctaaaaccttgaaaaataggccttgccttagccccaaacaccccactcctggtagctcagaccctctgatccaaccctccagccctgctgtgtgcccagagccaccttcctctcctaaatacgtctcttctgtcacttcccgaactggcagttctggagcaaaggagatgaaactcaagggggctgatggtaaaacgaagatcgccacaccgcggggagcagcccctccaggccagaagggccaggccaacgccaccaggattccagcaaaaaccccgcccgctccaaagacaccacccagctctggtgaacctccaaaatcaggggatcgcagcggctacagcagccccggctccccaggcactcccggcagccgctcccgcaccccgtcccttccaaccccacccacccgggagcccaagaaggtggcagtggtccgtactccacccaagtcgccgtcttccgccaagagccgcctgcagacagcccccgtgcccatgccagacctgaagaatgtcaagtccaagatcggctccactgagaacctgaagcaccagccgggaggcgggaaggtgcagataattaataagaagctggatcttagcaacgtccagtccaagtgtggctcaaaggataatatcaaacacgtcccgggaggcggcagtgtgcaaatagtctacaaaccagttgacctgagcaaggtgacctccaagtgtggctcattaggcaacatccatcataaaccaggaggtggccaggtggaagtaaaatctgagaagcttgacttcaaggacagagtccagtcgaagattgggtccctggacaatatcacccacgtccctggcggaggaaataaaaagattgaaacccacaagctgaccttccgcgagaacgccaaagccaagacagaccacggggcggagatcgtgtacaagtcgccagtggtgtctggggacacgtctccacggcatctcagcaatgtctcctccaccggcagcatcgacatggtagactcgccccagctcgccacgctagctgacgaggtgtctgcctccctggccaagcagggtttgtgatcaggcccctggggcggtcaataattgtggagaggagagaatgagagagtgtggaaaaaaaaagaataatgacccggcccccgccctctgcccccagctgctcctcgcagttcggttaattggttaatcacttaacctgcttttgtcactcggctttggctcgggacttcaaaatcagtgatgggagtaagagcaaatttcatctttccaaattgatgggtgggctagtaataaaatatttaaaaaaaaacattcaaaaacatggccacatccaacatttcctcaggcaattccttttgattcttttttcttccccctccatgtagaagagggagaaggagaggctctgaaagctgcttctgggggatttcaagggactgggggtgccaaccacctctggccctgttgtgggggtgtcacagaggcagtggcagcaacaaaggatttgaaacttggtgtgttcgtggagccacaggcagacgatgtcaaccttgtgtgagtgtgacgggggttggggtggggcgggaggccacgggggaggccgaggcaggggctgggcagaggggagaggaagcacaagaagtgggagtgggagaggaagccacgtgctggagagtagacatccccctccttgccgctgggagagccaaggcctatgccacctgcagcgtctgagcggccgcctgtccttggtggccgggggtgggggcctgctgtgggtcagtgtgccaccctctgcagggcagcctgtgggagaagggacagcgggtaaaaagagaaggcaagctggcaggagggtggcacttcgtggatgacctccttagaaaagactgaccttgatgtcttgagagcgctggcctcttcctccctccctgcagggtagggggcctgagttgaggggcttccctctgctccacagaaaccctgttttattgagttctgaaggttggaactgctgccatgattttggccactttgcagacctgggactttagggctaaccagttctctttgtaaggacttgtgcctcttgggagacgtccacccgtttccaagcctgggccactggcatctctggagtgtgtgggggtctgggaggcaggtcccgagccccctgtccttcccacggccactgcagtcaccccgtctgcgccgctgtgctgttgtctgccgtgagagcccaatcactgcctatacccctcatcacacgtcacaatgtcccgaattcccagcctcaccaccccttctcagtaatgaccctggttggttgcaggaggtacctactccatactgagggtgaaattaagggaaggcaaagtccaggcacaagagtgggaccccagcctctcactctcagttccactcatccaactgggaccctcaccacgaatctcatgatctgattcggttccctgtctcctcctcccgtcacagatgtgagccagggcactgctcagctgtgaccctaggtgtttctgccttgttgacatggagagagccctttcccctgagaaggcctggccccttcctgtgctgagcccacagcagcaggctgggtgtcttggttgtcagtggtggcaccaggatggaagggcaaggcacccagggcaggcccacagtcccgctgtcccccacttgcaccctagcttgtagctgccaacctcccagacagcccagcccgctgctcagctccacatgcatagtatcagccctccacacccgacaaaggggaacacacccccttggaaatggttcttttcccccagtcccagctggaagccatgctgtctgttctgctggagcagctgaacatatacatagatgttgccctgccctccccatctgcaccctgttgagttgtagttggatttgtctgtttatgcttggattcaccagagtgactatgatagtgaaaagaaaaaaaaaaaaaaaaaaggacgcatgtatcttgaaatgcttgtaaagaggtttctaacccaccctcacgaggtgtctctcacccccacactgggactcgtgtggcctgtgtggtgccaccctgctggggcctcccaagttttgaaaggctttcctcagcacctgggacccaacagagaccagcttctagcagctaaggaggccgttcagctgtgacgaaggcctgaagcacaggattaggactgaagcgatgatgtccccttccctacttccccttggggctccctgtgtcagggcacagactaggtcttgtggctggtctggcttgcggcgcgaggatggttctctctggtcatagcccgaagtctcatggcagtcccaaaggaggcttacaactcctgcatcacaagaaaaaggaagccactgccagctggggggatctgcagctcccagaagctccgtgagcctcagccacccctcagactgggttcctctccaagctcgccctctggaggggcagcgcagcctcccaccaagggccctgcgaccacagcagggattgggatgaattgcctgtcctggatctgctctagaggcccaagctgcctgcctgaggaaggatgacttgacaagtcaggagacactgttcccaaagccttgaccagagcacctcagcccgctgaccttgcacaaactccatctgctgccatgagaaaagggaagccgcctttgcaaaacattgctgcctaaagaaactcagcagcctcaggcccaattctgccacttctggtttgggtacagttaaaggcaaccctgagggacttggcagtagaaatccagggcctcccctggggctggcagcttcgtgtgcagctagagctttacctgaaaggaagtctctgggcccagaactctccaccaagagcctccctgccgttcgctgagtcccagcaattctcctaagttgaagggatctgagaaggagaaggaaatgtggggtagatttggtggtggttagagatatgcccccctcattactgccaacagtttcggctgcatttcttcacgcacctcggttcctcttcctgaagttcttgtgccctgctcttcagcaccatgggccttcttatacggaaggctctgggatctcccccttgtggggcaggctcttggggccagcctaagatcatggtttagggtgatcagtgctggcagataaattgaaaaggcacgctggcttgtgatcttaaatgaggacaatccccccagggctgggcactcctcccctcccctcacttctcccacctgcagagccagtgtccttgggtgggctagataggatatactgtatgccggctccttcaagctgctgactcactttatcaatagttccatttaaattgacttcagtggtgagactgtatcctgtttgctattgcttgttgtgctatggggggaggggggaggaatgtgtaagatagttaacatgggcaaagggagatcttggggtgcagcacttaaactgcctcgtaacccttttcatgatttcaaccacatttgctagagggagggagcagccacggagttagaggcccttggggtttctcttttccactgacaggctttcccaggcagctggctagttcattccctccccagccaggtgcaggcgtaggaatatggacatctggttgctttggcctgctgccctctttcaggggtcctaagcccacaatcatgcctccctaagaccttggcatccttccctctaagccgttggcacctctgtgccacctctcacactggctccagacacacagcctgtgcttttggagctgagatcactcgcttcaccctcctcatctttgttctccaagtaaagccacgaggtcggggcgagggcagaggtgatcacctgcgtgtcccatctacagacctgcagcttcataaaacttctgatttctcttcagctttgaaaagggttaccctgggcactggcctagagcctcacctcctaatagacttagccccatgagtttgccatgttgagcaggactatttctggcacttgcaagtcccatgatttcttcggtaattctgagggtggggggagggacatgaaatcatcttagcttagctttctgtctgtgaatgtctatatagtgtattgtgtgttttaacaaatgatttacactgactgttgctgtaaaagtgaatttggaaataaagttattactctgattaaa

SEQ ID NO: 301574 - RNA, 6524 nt, Homo sapiens
  source 1..6524: mol_type = mRNA
gcagtcaccgccacccaccagctccggcaccaacagcagcgccgctgccaccgcccaccttctgccgccgccaccacagccaccttctcctcctccgctgtcctctcccgtcctcgcctctgtcgactatcaggtgaactttgaaccaggatggctgagccccgccaggagttcgaagtgatggaagatcacgctgggacgtacgggttgggggacaggaaagatcaggggggctacaccatgcaccaagaccaagagggtgacacggacgctggcctgaaagaatctcccctgcagacccccactgaggacggatctgaggaaccgggctctgaaacctctgatgctaagagcactccaacagcggaagctgaagaagcaggcattggagacacccccagcctggaagacgaagctgctggtcacgtgacccaagaggagttgagagttccgggccggcagaggaaggcgcctgaaaggcccctggccaatgagattagcgcccacgtccagcctggaccctgcggagaggcctctggggtctctgggccgtgcctcggggagaaagagccagaagctcccgtcccgctgaccgcgagccttcctcagcaccgtcccgtttgcccagcgcctcctccaacaggaggccctcaggagccctccctggagtggggacaaaaaggcggggactgggccgagaagggtccggcctttccgaagcccgccaccactgcgtatctccacacagagcctgaaagtggtaaggtggtccaggaaggcttcctccgagagccaggccccccaggtctgagccaccagctcatgtccggcatgcctggggctcccctcctgcctgagggccccagagaggccacacgccaaccttcggggacaggacctgaggacacagagggcggccgccacgcccctgagctgctcaagcaccagcttctaggagacctgcaccaggaggggccgccgctgaagggggcagggggcaaagagaggccggggagcaaggaggaggtggatgaagaccgcgacgtcgatgagtcctccccccaagactcccctccctccaaggcctccccagcccaagatgggcggcctccccagacagccgccagagaagccaccagcatcccaggcttcccagcggagggtgccatccccctccctgtggatttcctctccaaagtttccacagagatcccagcctcagagcccgacgggcccagtgtagggcgggccaaagggcaggatgcccccctggagttcacgtttcacgtggaaatcacacccaacgtgcagaaggagcaggcgcactcggaggagcatttgggaagggctgcatttccaggggcccctggagaggggccagaggcccggggcccctctttgggagaggacacaaaagaggctgaccttccagagccctctgaaaagcagcctgctgctgctccgcgggggaagcccgtcagccgggtccctcaactcaaagctcgcatggtcagtaaaagcaaagacgggactggaagcgatgacaaaaaagccaagggggctgatggtaaaacgaagatcgccacaccgcggggagcagcccctccaggccagaagggccaggccaacgccaccaggattccagcaaaaaccccgcccgctccaaagacaccacccagctctggtgaacctccaaaatcaggggatcgcagcggctacagcagccccggctccccaggcactcccggcagccgctcccgcaccccgtcccttccaaccccacccacccgggagcccaagaaggtggcagtggtccgtactccacccaagtcgccgtcttccgccaagagccgcctgcagacagcccccgtgcccatgccagacctgaagaatgtcaagtccaagatcggctccactgagaacctgaagcaccagccgggaggcgggaaggtgcaaatagtctacaaaccagttgacctgagcaaggtgacctccaagtgtggctcattaggcaacatccatcataaaccaggaggtggccaggtggaagtaaaatctgagaagcttgacttcaaggacagagtccagtcgaagattgggtccctggacaatatcacccacgtccctggcggaggaaataaaaagattgaaacccacaagctgaccttccgcgagaacgccaaagccaagacagaccacggggcggagatcgtgtacaagtcgccagtggtgtctggggacacgtctccacggcatctcagcaatgtctcctccaccggcagcatcgacatggtagactcgccccagctcgccacgctagctgacgaggtgtctgcctccctggccaagcagggtttgtgatcaggcccctggggcggtcaataattgtggagaggagagaatgagagagtgtggaaaaaaaaagaataatgacccggcccccgccctctgcccccagctgctcctcgcagttcggttaattggttaatcacttaacctgcttttgtcactcggctttggctcgggacttcaaaatcagtgatgggagtaagagcaaatttcatctttccaaattgatgggtgggctagtaataaaatatttaaaaaaaaacattcaaaaacatggccacatccaacatttcctcaggcaattccttttgattcttttttcttccccctccatgtagaagagggagaaggagaggctctgaaagctgcttctgggggatttcaagggactgggggtgccaaccacctctggccctgttgtgggggtgtcacagaggcagtggcagcaacaaaggatttgaaacttggtgtgttcgtggagccacaggcagacgatgtcaaccttgtgtgagtgtgacgggggttggggtggggcgggaggccacgggggaggccgaggcaggggctgggcagaggggagaggaagcacaagaagtgggagtgggagaggaagccacgtgctggagagtagacatccccctccttgccgctgggagagccaaggcctatgccacctgcagcgtctgagcggccgcctgtccttggtggccgggggtgggggcctgctgtgggtcagtgtgccaccctctgcagggcagcctgtgggagaagggacagcgggtaaaaagagaaggcaagctggcaggagggtggcacttcgtggatgacctccttagaaaagactgaccttgatgtcttgagagcgctggcctcttcctccctccctgcagggtagggggcctgagttgaggggcttccctctgctccacagaaaccctgttttattgagttctgaaggttggaactgctgccatgattttggccactttgcagacctgggactttagggctaaccagttctctttgtaaggacttgtgcctcttgggagacgtccacccgtttccaagcctgggccactggcatctctggagtgtgtgggggtctgggaggcaggtcccgagccccctgtccttcccacggccactgcagtcaccccgtctgcgccgctgtgctgttgtctgccgtgagagcccaatcactgcctatacccctcatcacacgtcacaatgtcccgaattcccagcctcaccaccccttctcagtaatgaccctggttggttgcaggaggtacctactccatactgagggtgaaattaagggaaggcaaagtccaggcacaagagtgggaccccagcctctcactctcagttccactcatccaactgggaccctcaccacgaatctcatgatctgattcggttccctgtctcctcctcccgtcacagatgtgagccagggcactgctcagctgtgaccctaggtgtttctgccttgttgacatggagagagccctttcccctgagaaggcctggccccttcctgtgctgagcccacagcagcaggctgggtgtcttggttgtcagtggtggcaccaggatggaagggcaaggcacccagggcaggcccacagtcccgctgtcccccacttgcaccctagcttgtagctgccaacctcccagacagcccagcccgctgctcagctccacatgcatagtatcagccctccacacccgacaaaggggaacacacccccttggaaatggttcttttcccccagtcccagctggaagccatgctgtctgttctgctggagcagctgaacatatacatagatgttgccctgccctccccatctgcaccctgttgagttgtagttggatttgtctgtttatgcttggattcaccagagtgactatgatagtgaaaagaaaaaaaaaaaaaaaaaaggacgcatgtatcttgaaatgcttgtaaagaggtttctaacccaccctcacgaggtgtctctcacccccacactgggactcgtgtggcctgtgtggtgccaccctgctggggcctcccaagttttgaaaggctttcctcagcacctgggacccaacagagaccagcttctagcagctaaggaggccgttcagctgtgacgaaggcctgaagcacaggattaggactgaagcgatgatgtccccttccctacttccccttggggctccctgtgtcagggcacagactaggtcttgtggctggtctggcttgcggcgcgaggatggttctctctggtcatagcccgaagtctcatggcagtcccaaaggaggcttacaactcctgcatcacaagaaaaaggaagccactgccagctggggggatctgcagctcccagaagctccgtgagcctcagccacccctcagactgggttcctctccaagctcgccctctggaggggcagcgcagcctcccaccaagggccctgcgaccacagcagggattgggatgaattgcctgtcctggatctgctctagaggcccaagctgcctgcctgaggaaggatgacttgacaagtcaggagacactgttcccaaagccttgaccagagcacctcagcccgctgaccttgcacaaactccatctgctgccatgagaaaagggaagccgcctttgcaaaacattgctgcctaaagaaactcagcagcctcaggcccaattctgccacttctggtttgggtacagttaaaggcaaccctgagggacttggcagtagaaatccagggcctcccctggggctggcagcttcgtgtgcagctagagctttacctgaaaggaagtctctgggcccagaactctccaccaagagcctccctgccgttcgctgagtcccagcaattctcctaagttgaagggatctgagaaggagaaggaaatgtggggtagatttggtggtggttagagatatgcccccctcattactgccaacagtttcggctgcatttcttcacgcacctcggttcctcttcctgaagttcttgtgccctgctcttcagcaccatgggccttcttatacggaaggctctgggatctcccccttgtggggcaggctcttggggccagcctaagatcatggtttagggtgatcagtgctggcagataaattgaaaaggcacgctggcttgtgatcttaaatgaggacaatccccccagggctgggcactcctcccctcccctcacttctcccacctgcagagccagtgtccttgggtgggctagataggatatactgtatgccggctccttcaagctgctgactcactttatcaatagttccatttaaattgacttcagtggtgagactgtatcctgtttgctattgcttgttgtgctatggggggaggggggaggaatgtgtaagatagttaacatgggcaaagggagatcttggggtgcagcacttaaactgcctcgtaacccttttcatgatttcaaccacatttgctagagggagggagcagccacggagttagaggcccttggggtttctcttttccactgacaggctttcccaggcagctggctagttcattccctccccagccaggtgcaggcgtaggaatatggacatctggttgctttggcctgctgccctctttcaggggtcctaagcccacaatcatgcctccctaagaccttggcatccttccctctaagccgttggcacctctgtgccacctctcacactggctccagacacacagcctgtgcttttggagctgagatcactcgcttcaccctcctcatctttgttctccaagtaaagccacgaggtcggggcgagggcagaggtgatcacctgcgtgtcccatctacagacctgcagcttcataaaacttctgatttctcttcagctttgaaaagggttaccctgggcactggcctagagcctcacctcctaatagacttagccccatgagtttgccatgttgagcaggactatttctggcacttgcaagtcccatgatttcttcggtaattctgagggtggggggagggacatgaaatcatcttagcttagctttctgtctgtgaatgtctatatagtgtattgtgtgttttaacaaatgatttacactgactgttgctgtaaaagtgaatttggaaataaagttattactctgattaaa

SEQ ID NO: 301575 - RNA, 4139 nt, Homo sapiens
  source 1..4139: mol_type = mRNA
gcagtcaccgccacccaccagctccggcaccaacagcagcgccgctgccaccgcccaccttctgccgccgccaccacagccaccttctcctcctccgctgtcctctcccgtcctcgcctctgtcgactatcaggtgaactttgaaccaggatggctgagccccgccaggagttcgaagtgatggaagatcacgctgggacgtacgggttgggggacaggaaagatcaggggggctacaccatgcaccaagaccaagagggtgacacggacgctggcctgaaagaatctcccctgcagacccccactgaggacggatctgaggaaccgggctctgaaacctctgatgctaagagcactccaacagcggaagctgaagaagcaggcattggagacacccccagcctggaagacgaagctgctggtcacgtgacccaagctcgcatggtcagtaaaagcaaagacgggactggaagcgatgacaaaaaagccaagggggctgatggtaaaacgaagatcgccacaccgcggggagcagcccctccaggccagaagggccaggccaacgccaccaggattccagcaaaaaccccgcccgctccaaagacaccacccagctctggtgaacctccaaaatcaggggatcgcagcggctacagcagccccggctccccaggcactcccggcagccgctcccgcaccccgtcccttccaaccccacccacccgggagcccaagaaggtggcagtggtccgtactccacccaagtcgccgtcttccgccaagagccgcctgcagacagcccccgtgcccatgccagacctgaagaatgtcaagtccaagatcggctccactgagaacctgaagcaccagccgggaggcgggaaggtgcaaatagtctacaaaccagttgacctgagcaaggttggaactgctgccatgattttggccactttgcagacctgggactttagggctaaccagttctctttgtaaggacttgtgcctcttgggagacgtccacccgtttccaagcctgggccactggcatctctggagtgtgtgggggtctgggaggcaggtcccgagccccctgtccttcccacggccactgcagtcaccccgtctgcgccgctgtgctgttgtctgccgtgagagcccaatcactgcctatacccctcatcacacgtcacaatgtcccgaattcccagcctcaccaccccttctcagtaatgaccctggttggttgcaggaggtacctactccatactgagggtgaaattaagggaaggcaaagtccaggcacaagagtgggaccccagcctctcactctcagttccactcatccaactgggaccctcaccacgaatctcatgatctgattcggttccctgtctcctcctcccgtcacagatgtgagccagggcactgctcagctgtgaccctaggtgtttctgccttgttgacatggagagagccctttcccctgagaaggcctggccccttcctgtgctgagcccacagcagcaggctgggtgtcttggttgtcagtggtggcaccaggatggaagggcaaggcacccagggcaggcccacagtcccgctgtcccccacttgcaccctagcttgtagctgccaacctcccagacagcccagcccgctgctcagctccacatgcatagtatcagccctccacacccgacaaaggggaacacacccccttggaaatggttcttttcccccagtcccagctggaagccatgctgtctgttctgctggagcagctgaacatatacatagatgttgccctgccctccccatctgcaccctgttgagttgtagttggatttgtctgtttatgcttggattcaccagagtgactatgatagtgaaaagaaaaaaaaaaaaaaaaaaggacgcatgtatcttgaaatgcttgtaaagaggtttctaacccaccctcacgaggtgtctctcacccccacactgggactcgtgtggcctgtgtggtgccaccctgctggggcctcccaagttttgaaaggctttcctcagcacctgggacccaacagagaccagcttctagcagctaaggaggccgttcagctgtgacgaaggcctgaagcacaggattaggactgaagcgatgatgtccccttccctacttccccttggggctccctgtgtcagggcacagactaggtcttgtggctggtctggcttgcggcgcgaggatggttctctctggtcatagcccgaagtctcatggcagtcccaaaggaggcttacaactcctgcatcacaagaaaaaggaagccactgccagctggggggatctgcagctcccagaagctccgtgagcctcagccacccctcagactgggttcctctccaagctcgccctctggaggggcagcgcagcctcccaccaagggccctgcgaccacagcagggattgggatgaattgcctgtcctggatctgctctagaggcccaagctgcctgcctgaggaaggatgacttgacaagtcaggagacactgttcccaaagccttgaccagagcacctcagcccgctgaccttgcacaaactccatctgctgccatgagaaaagggaagccgcctttgcaaaacattgctgcctaaagaaactcagcagcctcaggcccaattctgccacttctggtttgggtacagttaaaggcaaccctgagggacttggcagtagaaatccagggcctcccctggggctggcagcttcgtgtgcagctagagctttacctgaaaggaagtctctgggcccagaactctccaccaagagcctccctgccgttcgctgagtcccagcaattctcctaagttgaagggatctgagaaggagaaggaaatgtggggtagatttggtggtggttagagatatgcccccctcattactgccaacagtttcggctgcatttcttcacgcacctcggttcctcttcctgaagttcttgtgccctgctcttcagcaccatgggccttcttatacggaaggctctgggatctcccccttgtggggcaggctcttggggccagcctaagatcatggtttagggtgatcagtgctggcagataaattgaaaaggcacgctggcttgtgatcttaaatgaggacaatccccccagggctgggcactcctcccctcccctcacttctcccacctgcagagccagtgtccttgggtgggctagataggatatactgtatgccggctccttcaagctgctgactcactttatcaatagttccatttaaattgacttcagtggtgagactgtatcctgtttgctattgcttgttgtgctatggggggaggggggaggaatgtgtaagatagttaacatgggcaaagggagatcttggggtgcagcacttaaactgcctcgtaacccttttcatgatttcaaccacatttgctagagggagggagcagccacggagttagaggcccttggggtttctcttttccactgacaggctttcccaggcagctggctagttcattccctccccagccaggtgcaggcgtaggaatatggacatctggttgctttggcctgctgccctctttcaggggtcctaagcccacaatcatgcctccctaagaccttggcatccttccctctaagccgttggcacctctgtgccacctctcacactggctccagacacacagcctgtgcttttggagctgagatcactcgcttcaccctcctcatctttgttctccaagtaaagccacgaggtcggggcgagggcagaggtgatcacctgcgtgtcccatctacagacctgcagcttcataaaacttctgatttctcttcagctttgaaaagggttaccctgggcactggcctagagcctcacctcctaatagacttagccccatgagtttgccatgttgagcaggactatttctggcacttgcaagtcccatgatttcttcggtaattctgagggtggggggagggacatgaaatcatcttagcttagctttctgtctgtgaatgtctatatagtgtattgtgtgttttaacaaatgatttacactgactgttgctgtaaaagtgaatttggaaataaagttattactctgattaaa

SEQ ID NO: 301576 - RNA, 5525 nt, Homo sapiens
  source 1..5525: mol_type = mRNA
gcagtcaccgccacccaccagctccggcaccaacagcagcgccgctgccaccgcccaccttctgccgccgccaccacagccaccttctcctcctccgctgtcctctcccgtcctcgcctctgtcgactatcagacaggctctgctgatgctgtccctctcctgttcagtcgtgccctcaccgttaaagagaaagagcaaactgctgggcagcagcattgatttttttaatgaagtggaaagagagctgggaataacaagtcgggcccacctcacctgcctcacctggtgaactttgaaccaggatggctgagccccgccaggagttcgaagtgatggaagatcacgctgggacgtacgggttgggggacaggaaagatcaggggggctacaccatgcaccaagaccaagagggtgacacggacgctggcctgaaagctgaagaagcaggcattggagacacccccagcctggaagacgaagctgctggtcacgtgacccaagctcgcatggtcagtaaaagcaaagacgggactggaagcgatgacaaaaaagccaagggggctgatggtaaaacgaagatcgccacaccgcggggagcagcccctccaggccagaagggccaggccaacgccaccaggattccagcaaaaaccccgcccgctccaaagacaccacccagctctggtgaacctccaaaatcaggggatcgcagcggctacagcagccccggctccccaggcactcccggcagccgctcccgcaccccgtcccttccaaccccacccacccgggagcccaagaaggtggcagtggtccgtactccacccaagtcgccgtcttccgccaagagccgcctgcagacagcccccgtgcccatgccagacctgaagaatgtcaagtccaagatcggctccactgagaacctgaagcaccagccgggaggcgggaaggtgcaaatagtctacaaaccagttgacctgagcaaggtgacctccaagtgtggctcattaggcaacatccatcataaaccaggaggtggccaggtggaagtaaaatctgagaagcttgacttcaaggacagagtccagtcgaagattgggtccctggacaatatcacccacgtccctggcggaggaaataaaaagattgaaacccacaagctgaccttccgcgagaacgccaaagccaagacagaccacggggcggagatcgtgtacaagtcgccagtggtgtctggggacacgtctccacggcatctcagcaatgtctcctccaccggcagcatcgacatggtagactcgccccagctcgccacgctagctgacgaggtgtctgcctccctggccaagcagggtttgtgatcaggcccctggggcggtcaataattgtggagaggagagaatgagagagtgtggaaaaaaaaagaataatgacccggcccccgccctctgcccccagctgctcctcgcagttcggttaattggttaatcacttaacctgcttttgtcactcggctttggctcgggacttcaaaatcagtgatgggagtaagagcaaatttcatctttccaaattgatgggtgggctagtaataaaatatttaaaaaaaaacattcaaaaacatggccacatccaacatttcctcaggcaattccttttgattcttttttcttccccctccatgtagaagagggagaaggagaggctctgaaagctgcttctgggggatttcaagggactgggggtgccaaccacctctggccctgttgtgggggtgtcacagaggcagtggcagcaacaaaggatttgaaacttggtgtgttcgtggagccacaggcagacgatgtcaaccttgtgtgagtgtgacgggggttggggtggggcgggaggccacgggggaggccgaggcaggggctgggcagaggggagaggaagcacaagaagtgggagtgggagaggaagccacgtgctggagagtagacatccccctccttgccgctgggagagccaaggcctatgccacctgcagcgtctgagcggccgcctgtccttggtggccgggggtgggggcctgctgtgggtcagtgtgccaccctctgcagggcagcctgtgggagaagggacagcgggtaaaaagagaaggcaagctggcaggagggtggcacttcgtggatgacctccttagaaaagactgaccttgatgtcttgagagcgctggcctcttcctccctccctgcagggtagggggcctgagttgaggggcttccctctgctccacagaaaccctgttttattgagttctgaaggttggaactgctgccatgattttggccactttgcagacctgggactttagggctaaccagttctctttgtaaggacttgtgcctcttgggagacgtccacccgtttccaagcctgggccactggcatctctggagtgtgtgggggtctgggaggcaggtcccgagccccctgtccttcccacggccactgcagtcaccccgtctgcgccgctgtgctgttgtctgccgtgagagcccaatcactgcctatacccctcatcacacgtcacaatgtcccgaattcccagcctcaccaccccttctcagtaatgaccctggttggttgcaggaggtacctactccatactgagggtgaaattaagggaaggcaaagtccaggcacaagagtgggaccccagcctctcactctcagttccactcatccaactgggaccctcaccacgaatctcatgatctgattcggttccctgtctcctcctcccgtcacagatgtgagccagggcactgctcagctgtgaccctaggtgtttctgccttgttgacatggagagagccctttcccctgagaaggcctggccccttcctgtgctgagcccacagcagcaggctgggtgtcttggttgtcagtggtggcaccaggatggaagggcaaggcacccagggcaggcccacagtcccgctgtcccccacttgcaccctagcttgtagctgccaacctcccagacagcccagcccgctgctcagctccacatgcatagtatcagccctccacacccgacaaaggggaacacacccccttggaaatggttcttttcccccagtcccagctggaagccatgctgtctgttctgctggagcagctgaacatatacatagatgttgccctgccctccccatctgcaccctgttgagttgtagttggatttgtctgtttatgcttggattcaccagagtgactatgatagtgaaaagaaaaaaaaaaaaaaaaaaggacgcatgtatcttgaaatgcttgtaaagaggtttctaacccaccctcacgaggtgtctctcacccccacactgggactcgtgtggcctgtgtggtgccaccctgctggggcctcccaagttttgaaaggctttcctcagcacctgggacccaacagagaccagcttctagcagctaaggaggccgttcagctgtgacgaaggcctgaagcacaggattaggactgaagcgatgatgtccccttccctacttccccttggggctccctgtgtcagggcacagactaggtcttgtggctggtctggcttgcggcgcgaggatggttctctctggtcatagcccgaagtctcatggcagtcccaaaggaggcttacaactcctgcatcacaagaaaaaggaagccactgccagctggggggatctgcagctcccagaagctccgtgagcctcagccacccctcagactgggttcctctccaagctcgccctctggaggggcagcgcagcctcccaccaagggccctgcgaccacagcagggattgggatgaattgcctgtcctggatctgctctagaggcccaagctgcctgcctgaggaaggatgacttgacaagtcaggagacactgttcccaaagccttgaccagagcacctcagcccgctgaccttgcacaaactccatctgctgccatgagaaaagggaagccgcctttgcaaaacattgctgcctaaagaaactcagcagcctcaggcccaattctgccacttctggtttgggtacagttaaaggcaaccctgagggacttggcagtagaaatccagggcctcccctggggctggcagcttcgtgtgcagctagagctttacctgaaaggaagtctctgggcccagaactctccaccaagagcctccctgccgttcgctgagtcccagcaattctcctaagttgaagggatctgagaaggagaaggaaatgtggggtagatttggtggtggttagagatatgcccccctcattactgccaacagtttcggctgcatttcttcacgcacctcggttcctcttcctgaagttcttgtgccctgctcttcagcaccatgggccttcttatacggaaggctctgggatctcccccttgtggggcaggctcttggggccagcctaagatcatggtttagggtgatcagtgctggcagataaattgaaaaggcacgctggcttgtgatcttaaatgaggacaatccccccagggctgggcactcctcccctcccctcacttctcccacctgcagagccagtgtccttgggtgggctagataggatatactgtatgccggctccttcaagctgctgactcactttatcaatagttccatttaaattgacttcagtggtgagactgtatcctgtttgctattgcttgttgtgctatggggggaggggggaggaatgtgtaagatagttaacatgggcaaagggagatcttggggtgcagcacttaaactgcctcgtaacccttttcatgatttcaaccacatttgctagagggagggagcagccacggagttagaggcccttggggtttctcttttccactgacaggctttcccaggcagctggctagttcattccctccccagccaggtgcaggcgtaggaatatggacatctggttgctttggcctgctgccctctttcaggggtcctaagcccacaatcatgcctccctaagaccttggcatccttccctctaagccgttggcacctctgtgccacctctcacactggctccagacacacagcctgtgcttttggagctgagatcactcgcttcaccctcctcatctttgttctccaagtaaagccacgaggtcggggcgagggcagaggtgatcacctgcgtgtcccatctacagacctgcagcttcataaaacttctgatttctcttcagctttgaaaagggttaccctgggcactggcctagagcctcacctcctaatagacttagccccatgagtttgccatgttgagcaggactatttctggcacttgcaagtcccatgatttcttcggtaattctgagggtggggggagggacatgaaatcatcttagcttagctttctgtctgtgaatgtctatatagtgtattgtgtgttttaacaaatgatttacactgactgttgctgtaaaagtgaatttggaaataaagttattactctgattaaa

SEQ ID NO: 301577 - RNA, 5639 nt, Homo sapiens
  source 1..5639: mol_type = mRNA
gcagtcaccgccacccaccagctccggcaccaacagcagcgccgctgccaccgcccaccttctgccgccgccaccacagccaccttctcctcctccgctgtcctctcccgtcctcgcctctgtcgactatcaggtgaactttgaaccaggatggctgagccccgccaggagttcgaagtgatggaagatcacgctgggacgtacgggttgggggacaggaaagatcaggggggctacaccatgcaccaagaccaagagggtgacacggacgctggcctgaaagaatctcccctgcagacccccactgaggacggatctgaggaaccgggctctgaaacctctgatgctaagagcactccaacagcggaagatgtgacagcacccttagtggatgagggagctcccggcaagcaggctgccgcgcagccccacacggagatcccagaaggaaccacagctgaagaagcaggcattggagacacccccagcctggaagacgaagctgctggtcacgtgacccaagctcgcatggtcagtaaaagcaaagacgggactggaagcgatgacaaaaaagccaagggggctgatggtaaaacgaagatcgccacaccgcggggagcagcccctccaggccagaagggccaggccaacgccaccaggattccagcaaaaaccccgcccgctccaaagacaccacccagctctggtgaacctccaaaatcaggggatcgcagcggctacagcagccccggctccccaggcactcccggcagccgctcccgcaccccgtcccttccaaccccacccacccgggagcccaagaaggtggcagtggtccgtactccacccaagtcgccgtcttccgccaagagccgcctgcagacagcccccgtgcccatgccagacctgaagaatgtcaagtccaagatcggctccactgagaacctgaagcaccagccgggaggcgggaaggtgcagataattaataagaagctggatcttagcaacgtccagtccaagtgtggctcaaaggataatatcaaacacgtcccgggaggcggcagtgtgcaaatagtctacaaaccagttgacctgagcaaggtgacctccaagtgtggctcattaggcaacatccatcataaaccaggaggtggccaggtggaagtaaaatctgagaagcttgacttcaaggacagagtccagtcgaagattgggtccctggacaatatcacccacgtccctggcggaggaaataaaaagattgaaacccacaagctgaccttccgcgagaacgccaaagccaagacagaccacggggcggagatcgtgtacaagtcgccagtggtgtctggggacacgtctccacggcatctcagcaatgtctcctccaccggcagcatcgacatggtagactcgccccagctcgccacgctagctgacgaggtgtctgcctccctggccaagcagggtttgtgatcaggcccctggggcggtcaataattgtggagaggagagaatgagagagtgtggaaaaaaaaagaataatgacccggcccccgccctctgcccccagctgctcctcgcagttcggttaattggttaatcacttaacctgcttttgtcactcggctttggctcgggacttcaaaatcagtgatgggagtaagagcaaatttcatctttccaaattgatgggtgggctagtaataaaatatttaaaaaaaaacattcaaaaacatggccacatccaacatttcctcaggcaattccttttgattcttttttcttccccctccatgtagaagagggagaaggagaggctctgaaagctgcttctgggggatttcaagggactgggggtgccaaccacctctggccctgttgtgggggtgtcacagaggcagtggcagcaacaaaggatttgaaacttggtgtgttcgtggagccacaggcagacgatgtcaaccttgtgtgagtgtgacgggggttggggtggggcgggaggccacgggggaggccgaggcaggggctgggcagaggggagaggaagcacaagaagtgggagtgggagaggaagccacgtgctggagagtagacatccccctccttgccgctgggagagccaaggcctatgccacctgcagcgtctgagcggccgcctgtccttggtggccgggggtgggggcctgctgtgggtcagtgtgccaccctctgcagggcagcctgtgggagaagggacagcgggtaaaaagagaaggcaagctggcaggagggtggcacttcgtggatgacctccttagaaaagactgaccttgatgtcttgagagcgctggcctcttcctccctccctgcagggtagggggcctgagttgaggggcttccctctgctccacagaaaccctgttttattgagttctgaaggttggaactgctgccatgattttggccactttgcagacctgggactttagggctaaccagttctctttgtaaggacttgtgcctcttgggagacgtccacccgtttccaagcctgggccactggcatctctggagtgtgtgggggtctgggaggcaggtcccgagccccctgtccttcccacggccactgcagtcaccccgtctgcgccgctgtgctgttgtctgccgtgagagcccaatcactgcctatacccctcatcacacgtcacaatgtcccgaattcccagcctcaccaccccttctcagtaatgaccctggttggttgcaggaggtacctactccatactgagggtgaaattaagggaaggcaaagtccaggcacaagagtgggaccccagcctctcactctcagttccactcatccaactgggaccctcaccacgaatctcatgatctgattcggttccctgtctcctcctcccgtcacagatgtgagccagggcactgctcagctgtgaccctaggtgtttctgccttgttgacatggagagagccctttcccctgagaaggcctggccccttcctgtgctgagcccacagcagcaggctgggtgtcttggttgtcagtggtggcaccaggatggaagggcaaggcacccagggcaggcccacagtcccgctgtcccccacttgcaccctagcttgtagctgccaacctcccagacagcccagcccgctgctcagctccacatgcatagtatcagccctccacacccgacaaaggggaacacacccccttggaaatggttcttttcccccagtcccagctggaagccatgctgtctgttctgctggagcagctgaacatatacatagatgttgccctgccctccccatctgcaccctgttgagttgtagttggatttgtctgtttatgcttggattcaccagagtgactatgatagtgaaaagaaaaaaaaaaaaaaaaaaggacgcatgtatcttgaaatgcttgtaaagaggtttctaacccaccctcacgaggtgtctctcacccccacactgggactcgtgtggcctgtgtggtgccaccctgctggggcctcccaagttttgaaaggctttcctcagcacctgggacccaacagagaccagcttctagcagctaaggaggccgttcagctgtgacgaaggcctgaagcacaggattaggactgaagcgatgatgtccccttccctacttccccttggggctccctgtgtcagggcacagactaggtcttgtggctggtctggcttgcggcgcgaggatggttctctctggtcatagcccgaagtctcatggcagtcccaaaggaggcttacaactcctgcatcacaagaaaaaggaagccactgccagctggggggatctgcagctcccagaagctccgtgagcctcagccacccctcagactgggttcctctccaagctcgccctctggaggggcagcgcagcctcccaccaagggccctgcgaccacagcagggattgggatgaattgcctgtcctggatctgctctagaggcccaagctgcctgcctgaggaaggatgacttgacaagtcaggagacactgttcccaaagccttgaccagagcacctcagcccgctgaccttgcacaaactccatctgctgccatgagaaaagggaagccgcctttgcaaaacattgctgcctaaagaaactcagcagcctcaggcccaattctgccacttctggtttgggtacagttaaaggcaaccctgagggacttggcagtagaaatccagggcctcccctggggctggcagcttcgtgtgcagctagagctttacctgaaaggaagtctctgggcccagaactctccaccaagagcctccctgccgttcgctgagtcccagcaattctcctaagttgaagggatctgagaaggagaaggaaatgtggggtagatttggtggtggttagagatatgcccccctcattactgccaacagtttcggctgcatttcttcacgcacctcggttcctcttcctgaagttcttgtgccctgctcttcagcaccatgggccttcttatacggaaggctctgggatctcccccttgtggggcaggctcttggggccagcctaagatcatggtttagggtgatcagtgctggcagataaattgaaaaggcacgctggcttgtgatcttaaatgaggacaatccccccagggctgggcactcctcccctcccctcacttctcccacctgcagagccagtgtccttgggtgggctagataggatatactgtatgccggctccttcaagctgctgactcactttatcaatagttccatttaaattgacttcagtggtgagactgtatcctgtttgctattgcttgttgtgctatggggggaggggggaggaatgtgtaagatagttaacatgggcaaagggagatcttggggtgcagcacttaaactgcctcgtaacccttttcatgatttcaaccacatttgctagagggagggagcagccacggagttagaggcccttggggtttctcttttccactgacaggctttcccaggcagctggctagttcattccctccccagccaggtgcaggcgtaggaatatggacatctggttgctttggcctgctgccctctttcaggggtcctaagcccacaatcatgcctccctaagaccttggcatccttccctctaagccgttggcacctctgtgccacctctcacactggctccagacacacagcctgtgcttttggagctgagatcactcgcttcaccctcctcatctttgttctccaagtaaagccacgaggtcggggcgagggcagaggtgatcacctgcgtgtcccatctacagacctgcagcttcataaaacttctgatttctcttcagctttgaaaagggttaccctgggcactggcctagagcctcacctcctaatagacttagccccatgagtttgccatgttgagcaggactatttctggcacttgcaagtcccatgatttcttcggtaattctgagggtggggggagggacatgaaatcatcttagcttagctttctgtctgtgaatgtctatatagtgtattgtgtgttttaacaaatgatttacactgactgttgctgtaaaagtgaatttggaaataaagttattactctgattaaa

SEQ ID NO: 301578 - RNA, 5465 nt, Homo sapiens
  source 1..5465: mol_type = mRNA
gcagtcaccgccacccaccagctccggcaccaacagcagcgccgctgccaccgcccaccttctgccgccgccaccacagccaccttctcctcctccgctgtcctctcccgtcctcgcctctgtcgactatcaggtgaactttgaaccaggatggctgagccccgccaggagttcgaagtgatggaagatcacgctgggacgtacgggttgggggacaggaaagatcaggggggctacaccatgcaccaagaccaagagggtgacacggacgctggcctgaaagctgaagaagcaggcattggagacacccccagcctggaagacgaagctgctggtcacgtgacccaagctcgcatggtcagtaaaagcaaagacgggactggaagcgatgacaaaaaagccaagggggctgatggtaaaacgaagatcgccacaccgcggggagcagcccctccaggccagaagggccaggccaacgccaccaggattccagcaaaaaccccgcccgctccaaagacaccacccagctctggtgaacctccaaaatcaggggatcgcagcggctacagcagccccggctccccaggcactcccggcagccgctcccgcaccccgtcccttccaaccccacccacccgggagcccaagaaggtggcagtggtccgtactccacccaagtcgccgtcttccgccaagagccgcctgcagacagcccccgtgcccatgccagacctgaagaatgtcaagtccaagatcggctccactgagaacctgaagcaccagccgggaggcgggaaggtgcagataattaataagaagctggatcttagcaacgtccagtccaagtgtggctcaaaggataatatcaaacacgtcccgggaggcggcagtgtgcaaatagtctacaaaccagttgacctgagcaaggtgacctccaagtgtggctcattaggcaacatccatcataaaccaggaggtggccaggtggaagtaaaatctgagaagcttgacttcaaggacagagtccagtcgaagattgggtccctggacaatatcacccacgtccctggcggaggaaataaaaagattgaaacccacaagctgaccttccgcgagaacgccaaagccaagacagaccacggggcggagatcgtgtacaagtcgccagtggtgtctggggacacgtctccacggcatctcagcaatgtctcctccaccggcagcatcgacatggtagactcgccccagctcgccacgctagctgacgaggtgtctgcctccctggccaagcagggtttgtgatcaggcccctggggcggtcaataattgtggagaggagagaatgagagagtgtggaaaaaaaaagaataatgacccggcccccgccctctgcccccagctgctcctcgcagttcggttaattggttaatcacttaacctgcttttgtcactcggctttggctcgggacttcaaaatcagtgatgggagtaagagcaaatttcatctttccaaattgatgggtgggctagtaataaaatatttaaaaaaaaacattcaaaaacatggccacatccaacatttcctcaggcaattccttttgattcttttttcttccccctccatgtagaagagggagaaggagaggctctgaaagctgcttctgggggatttcaagggactgggggtgccaaccacctctggccctgttgtgggggtgtcacagaggcagtggcagcaacaaaggatttgaaacttggtgtgttcgtggagccacaggcagacgatgtcaaccttgtgtgagtgtgacgggggttggggtggggcgggaggccacgggggaggccgaggcaggggctgggcagaggggagaggaagcacaagaagtgggagtgggagaggaagccacgtgctggagagtagacatccccctccttgccgctgggagagccaaggcctatgccacctgcagcgtctgagcggccgcctgtccttggtggccgggggtgggggcctgctgtgggtcagtgtgccaccctctgcagggcagcctgtgggagaagggacagcgggtaaaaagagaaggcaagctggcaggagggtggcacttcgtggatgacctccttagaaaagactgaccttgatgtcttgagagcgctggcctcttcctccctccctgcagggtagggggcctgagttgaggggcttccctctgctccacagaaaccctgttttattgagttctgaaggttggaactgctgccatgattttggccactttgcagacctgggactttagggctaaccagttctctttgtaaggacttgtgcctcttgggagacgtccacccgtttccaagcctgggccactggcatctctggagtgtgtgggggtctgggaggcaggtcccgagccccctgtccttcccacggccactgcagtcaccccgtctgcgccgctgtgctgttgtctgccgtgagagcccaatcactgcctatacccctcatcacacgtcacaatgtcccgaattcccagcctcaccaccccttctcagtaatgaccctggttggttgcaggaggtacctactccatactgagggtgaaattaagggaaggcaaagtccaggcacaagagtgggaccccagcctctcactctcagttccactcatccaactgggaccctcaccacgaatctcatgatctgattcggttccctgtctcctcctcccgtcacagatgtgagccagggcactgctcagctgtgaccctaggtgtttctgccttgttgacatggagagagccctttcccctgagaaggcctggccccttcctgtgctgagcccacagcagcaggctgggtgtcttggttgtcagtggtggcaccaggatggaagggcaaggcacccagggcaggcccacagtcccgctgtcccccacttgcaccctagcttgtagctgccaacctcccagacagcccagcccgctgctcagctccacatgcatagtatcagccctccacacccgacaaaggggaacacacccccttggaaatggttcttttcccccagtcccagctggaagccatgctgtctgttctgctggagcagctgaacatatacatagatgttgccctgccctccccatctgcaccctgttgagttgtagttggatttgtctgtttatgcttggattcaccagagtgactatgatagtgaaaagaaaaaaaaaaaaaaaaaaggacgcatgtatcttgaaatgcttgtaaagaggtttctaacccaccctcacgaggtgtctctcacccccacactgggactcgtgtggcctgtgtggtgccaccctgctggggcctcccaagttttgaaaggctttcctcagcacctgggacccaacagagaccagcttctagcagctaaggaggccgttcagctgtgacgaaggcctgaagcacaggattaggactgaagcgatgatgtccccttccctacttccccttggggctccctgtgtcagggcacagactaggtcttgtggctggtctggcttgcggcgcgaggatggttctctctggtcatagcccgaagtctcatggcagtcccaaaggaggcttacaactcctgcatcacaagaaaaaggaagccactgccagctggggggatctgcagctcccagaagctccgtgagcctcagccacccctcagactgggttcctctccaagctcgccctctggaggggcagcgcagcctcccaccaagggccctgcgaccacagcagggattgggatgaattgcctgtcctggatctgctctagaggcccaagctgcctgcctgaggaaggatgacttgacaagtcaggagacactgttcccaaagccttgaccagagcacctcagcccgctgaccttgcacaaactccatctgctgccatgagaaaagggaagccgcctttgcaaaacattgctgcctaaagaaactcagcagcctcaggcccaattctgccacttctggtttgggtacagttaaaggcaaccctgagggacttggcagtagaaatccagggcctcccctggggctggcagcttcgtgtgcagctagagctttacctgaaaggaagtctctgggcccagaactctccaccaagagcctccctgccgttcgctgagtcccagcaattctcctaagttgaagggatctgagaaggagaaggaaatgtggggtagatttggtggtggttagagatatgcccccctcattactgccaacagtttcggctgcatttcttcacgcacctcggttcctcttcctgaagttcttgtgccctgctcttcagcaccatgggccttcttatacggaaggctctgggatctcccccttgtggggcaggctcttggggccagcctaagatcatggtttagggtgatcagtgctggcagataaattgaaaaggcacgctggcttgtgatcttaaatgaggacaatccccccagggctgggcactcctcccctcccctcacttctcccacctgcagagccagtgtccttgggtgggctagataggatatactgtatgccggctccttcaagctgctgactcactttatcaatagttccatttaaattgacttcagtggtgagactgtatcctgtttgctattgcttgttgtgctatggggggaggggggaggaatgtgtaagatagttaacatgggcaaagggagatcttggggtgcagcacttaaactgcctcgtaacccttttcatgatttcaaccacatttgctagagggagggagcagccacggagttagaggcccttggggtttctcttttccactgacaggctttcccaggcagctggctagttcattccctccccagccaggtgcaggcgtaggaatatggacatctggttgctttggcctgctgccctctttcaggggtcctaagcccacaatcatgcctccctaagaccttggcatccttccctctaagccgttggcacctctgtgccacctctcacactggctccagacacacagcctgtgcttttggagctgagatcactcgcttcaccctcctcatctttgttctccaagtaaagccacgaggtcggggcgagggcagaggtgatcacctgcgtgtcccatctacagacctgcagcttcataaaacttctgatttctcttcagctttgaaaagggttaccctgggcactggcctagagcctcacctcctaatagacttagccccatgagtttgccatgttgagcaggactatttctggcacttgcaagtcccatgatttcttcggtaattctgagggtggggggagggacatgaaatcatcttagcttagctttctgtctgtgaatgtctatatagtgtattgtgtgttttaacaaatgatttacactgactgttgctgtaaaagtgaatttggaaataaagttattactctgattaaa

SEQ ID NO: 301579 - RNA, 6590 nt, Homo sapiens
  source 1..6590: mol_type = mRNA
gcagtcaccgccacccaccagctccggcaccaacagcagcgccgctgccaccgcccaccttctgccgccgccaccacagccaccttctcctcctccgctgtcctctcccgtcctcgcctctgtcgactatcaggtgaactttgaaccaggatggctgagccccgccaggagttcgaagtgatggaagatcacgctgggacgtacgggttgggggacaggaaagatcaggggggctacaccatgcaccaagaccaagagggtgacacggacgctggcctgaaagaatctcccctgcagacccccactgaggacggatctgaggaaccgggctctgaaacctctgatgctaagagcactccaacagcggaagatgtgacagcacccttagtggatgagggagctcccggcaagcaggctgccgcgcagccccacacggagatcccagaaggaaccacagctgaagaagcaggcattggagacacccccagcctggaagacgaagctgctggtcacgtgacccaagagcctgaaagtggtaaggtggtccaggaaggcttcctccgagagccaggccccccaggtctgagccaccagctcatgtccggcatgcctggggctcccctcctgcctgagggccccagagaggccacacgccaaccttcggggacaggacctgaggacacagagggcggccgccacgcccctgagctgctcaagcaccagcttctaggagacctgcaccaggaggggccgccgctgaagggggcagggggcaaagagaggccggggagcaaggaggaggtggatgaagaccgcgacgtcgatgagtcctccccccaagactcccctccctccaaggcctccccagcccaagatgggcggcctccccagacagccgccagagaagccaccagcatcccaggcttcccagcggagggtgccatccccctccctgtggatttcctctccaaagtttccacagagatcccagcctcagagcccgacgggcccagtgtagggcgggccaaagggcaggatgcccccctggagttcacgtttcacgtggaaatcacacccaacgtgcagaaggagcaggcgcactcggaggagcatttgggaagggctgcatttccaggggcccctggagaggggccagaggcccggggcccctctttgggagaggacacaaaagaggctgaccttccagagccctctgaaaagcagcctgctgctgctccgcgggggaagcccgtcagccgggtccctcaactcaaagctcgcatggtcagtaaaagcaaagacgggactggaagcgatgacaaaaaagccaagacatccacacgttcctctgctaaaaccttgaaaaataggccttgccttagccccaaacaccccactcctggtagctcagaccctctgatccaaccctccagccctgctgtgtgcccagagccaccttcctctcctaaatacgtctcttctgtcacttcccgaactggcagttctggagcaaaggagatgaaactcaagggggctgatggtaaaacgaagatcgccacaccgcggggagcagcccctccaggccagaagggccaggccaacgccaccaggattccagcaaaaaccccgcccgctccaaagacaccacccagctctggtgaacctccaaaatcaggggatcgcagcggctacagcagccccggctccccaggcactcccggcagccgctcccgcaccccgtcccttccaaccccacccacccgggagcccaagaaggtggcagtggtccgtactccacccaagtcgccgtcttccgccaagagccgcctgcagacagcccccgtgcccatgccagacctgaagaatgtcaagtccaagatcggctccactgagaacctgaagcaccagccgggaggcgggaaggtgcagataattaataagaagctggatcttagcaacgtccagtccaagtgtggctcaaaggataatatcaaacacgtcccgggaggcggcagtgtgcaaatagtctacaaaccagttgacctgagcaaggtgacctccaagtgtggctcattaggcaacatccatcataaaccaggaggtggccaggtggaagtaaaatctgagaagcttgacttcaaggacagagtccagtcgaagattgggtccctggacaatatcacccacgtccctggcggaggaaataaaaagattgaaacccacaagctgaccttccgcgagaacgccaaagccaagacagaccacggggcggagatcgtgtacaagtcgccagtggtgtctggggacacgtctccacggcatctcagcaatgtctcctccaccggcagcatcgacatggtagactcgccccagctcgccacgctagctgacgaggtgtctgcctccctggccaagcagggtttgtgatcaggcccctggggcggtcaataattgtggagaggagagaatgagagagtgtggaaaaaaaaagaataatgacccggcccccgccctctgcccccagctgctcctcgcagttcggttaattggttaatcacttaacctgcttttgtcactcggctttggctcgggacttcaaaatcagtgatgggagtaagagcaaatttcatctttccaaattgatgggtgggctagtaataaaatatttaaaaaaaaacattcaaaaacatggccacatccaacatttcctcaggcaattccttttgattcttttttcttccccctccatgtagaagagggagaaggagaggctctgaaagctgcttctgggggatttcaagggactgggggtgccaaccacctctggccctgttgtgggggtgtcacagaggcagtggcagcaacaaaggatttgaaacttggtgtgttcgtggagccacaggcagacgatgtcaaccttgtgtgagtgtgacgggggttggggtggggcgggaggccacgggggaggccgaggcaggggctgggcagaggggagaggaagcacaagaagtgggagtgggagaggaagccacgtgctggagagtagacatccccctccttgccgctgggagagccaaggcctatgccacctgcagcgtctgagcggccgcctgtccttggtggccgggggtgggggcctgctgtgggtcagtgtgccaccctctgcagggcagcctgtgggagaagggacagcgggtaaaaagagaaggcaagctggcaggagggtggcacttcgtggatgacctccttagaaaagactgaccttgatgtcttgagagcgctggcctcttcctccctccctgcagggtagggggcctgagttgaggggcttccctctgctccacagaaaccctgttttattgagttctgaaggttggaactgctgccatgattttggccactttgcagacctgggactttagggctaaccagttctctttgtaaggacttgtgcctcttgggagacgtccacccgtttccaagcctgggccactggcatctctggagtgtgtgggggtctgggaggcaggtcccgagccccctgtccttcccacggccactgcagtcaccccgtctgcgccgctgtgctgttgtctgccgtgagagcccaatcactgcctatacccctcatcacacgtcacaatgtcccgaattcccagcctcaccaccccttctcagtaatgaccctggttggttgcaggaggtacctactccatactgagggtgaaattaagggaaggcaaagtccaggcacaagagtgggaccccagcctctcactctcagttccactcatccaactgggaccctcaccacgaatctcatgatctgattcggttccctgtctcctcctcccgtcacagatgtgagccagggcactgctcagctgtgaccctaggtgtttctgccttgttgacatggagagagccctttcccctgagaaggcctggccccttcctgtgctgagcccacagcagcaggctgggtgtcttggttgtcagtggtggcaccaggatggaagggcaaggcacccagggcaggcccacagtcccgctgtcccccacttgcaccctagcttgtagctgccaacctcccagacagcccagcccgctgctcagctccacatgcatagtatcagccctccacacccgacaaaggggaacacacccccttggaaatggttcttttcccccagtcccagctggaagccatgctgtctgttctgctggagcagctgaacatatacatagatgttgccctgccctccccatctgcaccctgttgagttgtagttggatttgtctgtttatgcttggattcaccagagtgactatgatagtgaaaagaaaaaaaaaaaaaaaaaaggacgcatgtatcttgaaatgcttgtaaagaggtttctaacccaccctcacgaggtgtctctcacccccacactgggactcgtgtggcctgtgtggtgccaccctgctggggcctcccaagttttgaaaggctttcctcagcacctgggacccaacagagaccagcttctagcagctaaggaggccgttcagctgtgacgaaggcctgaagcacaggattaggactgaagcgatgatgtccccttccctacttccccttggggctccctgtgtcagggcacagactaggtcttgtggctggtctggcttgcggcgcgaggatggttctctctggtcatagcccgaagtctcatggcagtcccaaaggaggcttacaactcctgcatcacaagaaaaaggaagccactgccagctggggggatctgcagctcccagaagctccgtgagcctcagccacccctcagactgggttcctctccaagctcgccctctggaggggcagcgcagcctcccaccaagggccctgcgaccacagcagggattgggatgaattgcctgtcctggatctgctctagaggcccaagctgcctgcctgaggaaggatgacttgacaagtcaggagacactgttcccaaagccttgaccagagcacctcagcccgctgaccttgcacaaactccatctgctgccatgagaaaagggaagccgcctttgcaaaacattgctgcctaaagaaactcagcagcctcaggcccaattctgccacttctggtttgggtacagttaaaggcaaccctgagggacttggcagtagaaatccagggcctcccctggggctggcagcttcgtgtgcagctagagctttacctgaaaggaagtctctgggcccagaactctccaccaagagcctccctgccgttcgctgagtcccagcaattctcctaagttgaagggatctgagaaggagaaggaaatgtggggtagatttggtggtggttagagatatgcccccctcattactgccaacagtttcggctgcatttcttcacgcacctcggttcctcttcctgaagttcttgtgccctgctcttcagcaccatgggccttcttatacggaaggctctgggatctcccccttgtggggcaggctcttggggccagcctaagatcatggtttagggtgatcagtgctggcagataaattgaaaaggcacgctggcttgtgatcttaaatgaggacaatccccccagggctgggcactcctcccctcccctcacttctcccacctgcagagccagtgtccttgggtgggctagataggatatactgtatgccggctccttcaagctgctgactcactttatcaatagttccatttaaattgacttcagtggtgagactgtatcctgtttgctattgcttgttgtgctatggggggaggggggaggaatgtgtaagatagttaacatgggcaaagggagatcttggggtgcagcacttaaactgcctcgtaacccttttcatgatttcaaccacatttgctagagggagggagcagccacggagttagaggcccttggggtttctcttttccactgacaggctttcccaggcagctggctagttcattccctccccagccaggtgcaggcgtaggaatatggacatctggttgctttggcctgctgccctctttcaggggtcctaagcccacaatcatgcctccctaagaccttggcatccttccctctaagccgttggcacctctgtgccacctctcacactggctccagacacacagcctgtgcttttggagctgagatcactcgcttcaccctcctcatctttgttctccaagtaaagccacgaggtcggggcgagggcagaggtgatcacctgcgtgtcccatctacagacctgcagcttcataaaacttctgatttctcttcagctttgaaaagggttaccctgggcactggcctagagcctcacctcctaatagacttagccccatgagtttgccatgttgagcaggactatttctggcacttgcaagtcccatgatttcttcggtaattctgagggtggggggagggacatgaaatcatcttagcttagctttctgtctgtgaatgtctatatagtgtattgtgtgttttaacaaatgatttacactgactgttgctgtaaaagtgaatttggaaataaagttattactctgattaaa

SEQ ID NO: 301580 - RNA, 5372 nt, Homo sapiens
  source 1..5372: mol_type = mRNA
gcagtcaccgccacccaccagctccggcaccaacagcagcgccgctgccaccgcccaccttctgccgccgccaccacagccaccttctcctcctccgctgtcctctcccgtcctcgcctctgtcgactatcaggtgaactttgaaccaggatggctgagccccgccaggagttcgaagtgatggaagatcacgctgggacgtacgggttgggggacaggaaagatcaggggggctacaccatgcaccaagaccaagagggtgacacggacgctggcctgaaagctgaagaagcaggcattggagacacccccagcctggaagacgaagctgctggtcacgtgacccaagctcgcatggtcagtaaaagcaaagacgggactggaagcgatgacaaaaaagccaagggggctgatggtaaaacgaagatcgccacaccgcggggagcagcccctccaggccagaagggccaggccaacgccaccaggattccagcaaaaaccccgcccgctccaaagacaccacccagctctggtgaacctccaaaatcaggggatcgcagcggctacagcagccccggctccccaggcactcccggcagccgctcccgcaccccgtcccttccaaccccacccacccgggagcccaagaaggtggcagtggtccgtactccacccaagtcgccgtcttccgccaagagccgcctgcagacagcccccgtgcccatgccagacctgaagaatgtcaagtccaagatcggctccactgagaacctgaagcaccagccgggaggcgggaaggtgcaaatagtctacaaaccagttgacctgagcaaggtgacctccaagtgtggctcattaggcaacatccatcataaaccaggaggtggccaggtggaagtaaaatctgagaagcttgacttcaaggacagagtccagtcgaagattgggtccctggacaatatcacccacgtccctggcggaggaaataaaaagattgaaacccacaagctgaccttccgcgagaacgccaaagccaagacagaccacggggcggagatcgtgtacaagtcgccagtggtgtctggggacacgtctccacggcatctcagcaatgtctcctccaccggcagcatcgacatggtagactcgccccagctcgccacgctagctgacgaggtgtctgcctccctggccaagcagggtttgtgatcaggcccctggggcggtcaataattgtggagaggagagaatgagagagtgtggaaaaaaaaagaataatgacccggcccccgccctctgcccccagctgctcctcgcagttcggttaattggttaatcacttaacctgcttttgtcactcggctttggctcgggacttcaaaatcagtgatgggagtaagagcaaatttcatctttccaaattgatgggtgggctagtaataaaatatttaaaaaaaaacattcaaaaacatggccacatccaacatttcctcaggcaattccttttgattcttttttcttccccctccatgtagaagagggagaaggagaggctctgaaagctgcttctgggggatttcaagggactgggggtgccaaccacctctggccctgttgtgggggtgtcacagaggcagtggcagcaacaaaggatttgaaacttggtgtgttcgtggagccacaggcagacgatgtcaaccttgtgtgagtgtgacgggggttggggtggggcgggaggccacgggggaggccgaggcaggggctgggcagaggggagaggaagcacaagaagtgggagtgggagaggaagccacgtgctggagagtagacatccccctccttgccgctgggagagccaaggcctatgccacctgcagcgtctgagcggccgcctgtccttggtggccgggggtgggggcctgctgtgggtcagtgtgccaccctctgcagggcagcctgtgggagaagggacagcgggtaaaaagagaaggcaagctggcaggagggtggcacttcgtggatgacctccttagaaaagactgaccttgatgtcttgagagcgctggcctcttcctccctccctgcagggtagggggcctgagttgaggggcttccctctgctccacagaaaccctgttttattgagttctgaaggttggaactgctgccatgattttggccactttgcagacctgggactttagggctaaccagttctctttgtaaggacttgtgcctcttgggagacgtccacccgtttccaagcctgggccactggcatctctggagtgtgtgggggtctgggaggcaggtcccgagccccctgtccttcccacggccactgcagtcaccccgtctgcgccgctgtgctgttgtctgccgtgagagcccaatcactgcctatacccctcatcacacgtcacaatgtcccgaattcccagcctcaccaccccttctcagtaatgaccctggttggttgcaggaggtacctactccatactgagggtgaaattaagggaaggcaaagtccaggcacaagagtgggaccccagcctctcactctcagttccactcatccaactgggaccctcaccacgaatctcatgatctgattcggttccctgtctcctcctcccgtcacagatgtgagccagggcactgctcagctgtgaccctaggtgtttctgccttgttgacatggagagagccctttcccctgagaaggcctggccccttcctgtgctgagcccacagcagcaggctgggtgtcttggttgtcagtggtggcaccaggatggaagggcaaggcacccagggcaggcccacagtcccgctgtcccccacttgcaccctagcttgtagctgccaacctcccagacagcccagcccgctgctcagctccacatgcatagtatcagccctccacacccgacaaaggggaacacacccccttggaaatggttcttttcccccagtcccagctggaagccatgctgtctgttctgctggagcagctgaacatatacatagatgttgccctgccctccccatctgcaccctgttgagttgtagttggatttgtctgtttatgcttggattcaccagagtgactatgatagtgaaaagaaaaaaaaaaaaaaaaaaggacgcatgtatcttgaaatgcttgtaaagaggtttctaacccaccctcacgaggtgtctctcacccccacactgggactcgtgtggcctgtgtggtgccaccctgctggggcctcccaagttttgaaaggctttcctcagcacctgggacccaacagagaccagcttctagcagctaaggaggccgttcagctgtgacgaaggcctgaagcacaggattaggactgaagcgatgatgtccccttccctacttccccttggggctccctgtgtcagggcacagactaggtcttgtggctggtctggcttgcggcgcgaggatggttctctctggtcatagcccgaagtctcatggcagtcccaaaggaggcttacaactcctgcatcacaagaaaaaggaagccactgccagctggggggatctgcagctcccagaagctccgtgagcctcagccacccctcagactgggttcctctccaagctcgccctctggaggggcagcgcagcctcccaccaagggccctgcgaccacagcagggattgggatgaattgcctgtcctggatctgctctagaggcccaagctgcctgcctgaggaaggatgacttgacaagtcaggagacactgttcccaaagccttgaccagagcacctcagcccgctgaccttgcacaaactccatctgctgccatgagaaaagggaagccgcctttgcaaaacattgctgcctaaagaaactcagcagcctcaggcccaattctgccacttctggtttgggtacagttaaaggcaaccctgagggacttggcagtagaaatccagggcctcccctggggctggcagcttcgtgtgcagctagagctttacctgaaaggaagtctctgggcccagaactctccaccaagagcctccctgccgttcgctgagtcccagcaattctcctaagttgaagggatctgagaaggagaaggaaatgtggggtagatttggtggtggttagagatatgcccccctcattactgccaacagtttcggctgcatttcttcacgcacctcggttcctcttcctgaagttcttgtgccctgctcttcagcaccatgggccttcttatacggaaggctctgggatctcccccttgtggggcaggctcttggggccagcctaagatcatggtttagggtgatcagtgctggcagataaattgaaaaggcacgctggcttgtgatcttaaatgaggacaatccccccagggctgggcactcctcccctcccctcacttctcccacctgcagagccagtgtccttgggtgggctagataggatatactgtatgccggctccttcaagctgctgactcactttatcaatagttccatttaaattgacttcagtggtgagactgtatcctgtttgctattgcttgttgtgctatggggggaggggggaggaatgtgtaagatagttaacatgggcaaagggagatcttggggtgcagcacttaaactgcctcgtaacccttttcatgatttcaaccacatttgctagagggagggagcagccacggagttagaggcccttggggtttctcttttccactgacaggctttcccaggcagctggctagttcattccctccccagccaggtgcaggcgtaggaatatggacatctggttgctttggcctgctgccctctttcaggggtcctaagcccacaatcatgcctccctaagaccttggcatccttccctctaagccgttggcacctctgtgccacctctcacactggctccagacacacagcctgtgcttttggagctgagatcactcgcttcaccctcctcatctttgttctccaagtaaagccacgaggtcggggcgagggcagaggtgatcacctgcgtgtcccatctacagacctgcagcttcataaaacttctgatttctcttcagctttgaaaagggttaccctgggcactggcctagagcctcacctcctaatagacttagccccatgagtttgccatgttgagcaggactatttctggcacttgcaagtcccatgatttcttcggtaattctgagggtggggggagggacatgaaatcatcttagcttagctttctgtctgtgaatgtctatatagtgtattgtgtgttttaacaaatgatttacactgactgttgctgtaaaagtgaatttggaaataaagttattactctgattaaa

SEQ ID NO: 301581 - RNA, 5320 nt, Homo sapiens
  source 1..5320: mol_type = genomic RNA
gcagtcaccgccacccaccagctccggcaccaacagcagcgccgctgccaccgcccaccttctgccgccgccaccacagccaccttctcctcctccgctgtcctctcccgtcctcgcctctgtcgactatcaggtgaactttgaaccaggatggctgagccccgccaggagttcgaagtgatggaagatcacgctgggacgtacgggttgggggacaggaaagatcaggggggctacaccatgcaccaagaccaagagggtgacacggacgctggcctgaaagaatctcccctgcagacccccactgaggacggatctgaggaaccgggctctgaaacctctgatgctaagagcactccaacagcggaagctgaagaagcaggcattggagacacccccagcctggaagacgaagctgctggtcacgtgacccaagctcgcatggtcagtaaaagcaaagacgggactggaagcgatgacaaaaaagccaagggggctgatggtaaaacgaagatcgccacaccgcggggagcagcccctccaggccagaagggccaggccaacgccaccaggattccagcaaaaacccccccaagaaggtggcagtggtccgtactccacccaagtcgccgtcttccgccaagagccgcctgcagacagcccccgtgcccatgccagacctgaagaatgtcaagtccaagatcggctccactgagaacctgaagcaccagccgggaggcgggaaggtgcaaatagtctacaaaccagttgacctgagcaaggtgacctccaagtgtggctcattaggcaacatccatcataaaccaggaggtggccaggtggaagtaaaatctgagaagcttgacttcaaggacagagtccagtcgaagattgggtccctggacaatatcacccacgtccctggcggaggaaataaaaagattgaaacccacaagctgaccttccgcgagaacgccaaagccaagacagaccacggggcggagatcgtgtacaagtcgccagtggtgtctggggacacgtctccacggcatctcagcaatgtctcctccaccggcagcatcgacatggtagactcgccccagctcgccacgctagctgacgaggtgtctgcctccctggccaagcagggtttgtgatcaggcccctggggcggtcaataattgtggagaggagagaatgagagagtgtggaaaaaaaaagaataatgacccggcccccgccctctgcccccagctgctcctcgcagttcggttaattggttaatcacttaacctgcttttgtcactcggctttggctcgggacttcaaaatcagtgatgggagtaagagcaaatttcatctttccaaattgatgggtgggctagtaataaaatatttaaaaaaaaacattcaaaaacatggccacatccaacatttcctcaggcaattccttttgattcttttttcttccccctccatgtagaagagggagaaggagaggctctgaaagctgcttctgggggatttcaagggactgggggtgccaaccacctctggccctgttgtgggggtgtcacagaggcagtggcagcaacaaaggatttgaaacttggtgtgttcgtggagccacaggcagacgatgtcaaccttgtgtgagtgtgacgggggttggggtggggcgggaggccacgggggaggccgaggcaggggctgggcagaggggagaggaagcacaagaagtgggagtgggagaggaagccacgtgctggagagtagacatccccctccttgccgctgggagagccaaggcctatgccacctgcagcgtctgagcggccgcctgtccttggtggccgggggtgggggcctgctgtgggtcagtgtgccaccctctgcagggcagcctgtgggagaagggacagcgggtaaaaagagaaggcaagctggcaggagggtggcacttcgtggatgacctccttagaaaagactgaccttgatgtcttgagagcgctggcctcttcctccctccctgcagggtagggggcctgagttgaggggcttccctctgctccacagaaaccctgttttattgagttctgaaggttggaactgctgccatgattttggccactttgcagacctgggactttagggctaaccagttctctttgtaaggacttgtgcctcttgggagacgtccacccgtttccaagcctgggccactggcatctctggagtgtgtgggggtctgggaggcaggtcccgagccccctgtccttcccacggccactgcagtcaccccgtctgcgccgctgtgctgttgtctgccgtgagagcccaatcactgcctatacccctcatcacacgtcacaatgtcccgaattcccagcctcaccaccccttctcagtaatgaccctggttggttgcaggaggtacctactccatactgagggtgaaattaagggaaggcaaagtccaggcacaagagtgggaccccagcctctcactctcagttccactcatccaactgggaccctcaccacgaatctcatgatctgattcggttccctgtctcctcctcccgtcacagatgtgagccagggcactgctcagctgtgaccctaggtgtttctgccttgttgacatggagagagccctttcccctgagaaggcctggccccttcctgtgctgagcccacagcagcaggctgggtgtcttggttgtcagtggtggcaccaggatggaagggcaaggcacccagggcaggcccacagtcccgctgtcccccacttgcaccctagcttgtagctgccaacctcccagacagcccagcccgctgctcagctccacatgcatagtatcagccctccacacccgacaaaggggaacacacccccttggaaatggttcttttcccccagtcccagctggaagccatgctgtctgttctgctggagcagctgaacatatacatagatgttgccctgccctccccatctgcaccctgttgagttgtagttggatttgtctgtttatgcttggattcaccagagtgactatgatagtgaaaagaaaaaaaaaaaaaaaaaaggacgcatgtatcttgaaatgcttgtaaagaggtttctaacccaccctcacgaggtgtctctcacccccacactgggactcgtgtggcctgtgtggtgccaccctgctggggcctcccaagttttgaaaggctttcctcagcacctgggacccaacagagaccagcttctagcagctaaggaggccgttcagctgtgacgaaggcctgaagcacaggattaggactgaagcgatgatgtccccttccctacttccccttggggctccctgtgtcagggcacagactaggtcttgtggctggtctggcttgcggcgcgaggatggttctctctggtcatagcccgaagtctcatggcagtcccaaaggaggcttacaactcctgcatcacaagaaaaaggaagccactgccagctggggggatctgcagctcccagaagctccgtgagcctcagccacccctcagactgggttcctctccaagctcgccctctggaggggcagcgcagcctcccaccaagggccctgcgaccacagcagggattgggatgaattgcctgtcctggatctgctctagaggcccaagctgcctgcctgaggaaggatgacttgacaagtcaggagacactgttcccaaagccttgaccagagcacctcagcccgctgaccttgcacaaactccatctgctgccatgagaaaagggaagccgcctttgcaaaacattgctgcctaaagaaactcagcagcctcaggcccaattctgccacttctggtttgggtacagttaaaggcaaccctgagggacttggcagtagaaatccagggcctcccctggggctggcagcttcgtgtgcagctagagctttacctgaaaggaagtctctgggcccagaactctccaccaagagcctccctgccgttcgctgagtcccagcaattctcctaagttgaagggatctgagaaggagaaggaaatgtggggtagatttggtggtggttagagatatgcccccctcattactgccaacagtttcggctgcatttcttcacgcacctcggttcctcttcctgaagttcttgtgccctgctcttcagcaccatgggccttcttatacggaaggctctgggatctcccccttgtggggcaggctcttggggccagcctaagatcatggtttagggtgatcagtgctggcagataaattgaaaaggcacgctggcttgtgatcttaaatgaggacaatccccccagggctgggcactcctcccctcccctcacttctcccacctgcagagccagtgtccttgggtgggctagataggatatactgtatgccggctccttcaagctgctgactcactttatcaatagttccatttaaattgacttcagtggtgagactgtatcctgtttgctattgcttgttgtgctatggggggaggggggaggaatgtgtaagatagttaacatgggcaaagggagatcttggggtgcagcacttaaactgcctcgtaacccttttcatgatttcaaccacatttgctagagggagggagcagccacggagttagaggcccttggggtttctcttttccactgacaggctttcccaggcagctggctagttcattccctccccagccaggtgcaggcgtaggaatatggacatctggttgctttggcctgctgccctctttcaggggtcctaagcccacaatcatgcctccctaagaccttggcatccttccctctaagccgttggcacctctgtgccacctctcacactggctccagacacacagcctgtgcttttggagctgagatcactcgcttcaccctcctcatctttgttctccaagtaaagccacgaggtcggggcgagggcagaggtgatcacctgcgtgtcccatctacagacctgcagcttcataaaacttctgatttctcttcagctttgaaaagggttaccctgggcactggcctagagcctcacctcctaatagacttagccccatgagtttgccatgttgagcaggactatttctggcacttgcaagtcccatgatttcttcggtaattctgagggtggggggagggacatgaaatcatcttagcttagctttctgtctgtgaatgtctatatagtgtattgtgtgttttaacaaatgatttacactgactgttgctgtaaaagtgaatttggaaataaagttattactctgattaaa

SEQ ID NO: 301582 - RNA, 5750 nt, Homo sapiens
  source 1..5750: mol_type = mRNA
gcagtcaccgccacccaccagctccggcaccaacagcagcgccgctgccaccgcccaccttctgccgccgccaccacagccaccttctcctcctccgctgtcctctcccgtcctcgcctctgtcgactatcaggtgaactttgaaccaggatggctgagccccgccaggagttcgaagtgatggaagatcacgctgggacgtacgggttgggggacaggaaagatcaggggggctacaccatgcaccaagaccaagagggtgacacggacgctggcctgaaagaatctcccctgcagacccccactgaggacggatctgaggaaccgggctctgaaacctctgatgctaagagcactccaacagcggaagctgaagaagcaggcattggagacacccccagcctggaagacgaagctgctggtcacgtgacccaagctcgcatggtcagtaaaagcaaagacgggactggaagcgatgacaaaaaagccaagacatccacacgttcctctgctaaaaccttgaaaaataggccttgccttagccccaaacaccccactcctggtagctcagaccctctgatccaaccctccagccctgctgtgtgcccagagccaccttcctctcctaaatacgtctcttctgtcacttcccgaactggcagttctggagcaaaggagatgaaactcaagggggctgatggtaaaacgaagatcgccacaccgcggggagcagcccctccaggccagaagggccaggccaacgccaccaggattccagcaaaaaccccgcccgctccaaagacaccacccagctctggtgaacctccaaaatcaggggatcgcagcggctacagcagccccggctccccaggcactcccggcagccgctcccgcaccccgtcccttccaaccccacccacccgggagcccaagaaggtggcagtggtccgtactccacccaagtcgccgtcttccgccaagagccgcctgcagacagcccccgtgcccatgccagacctgaagaatgtcaagtccaagatcggctccactgagaacctgaagcaccagccgggaggcgggaaggtgcagataattaataagaagctggatcttagcaacgtccagtccaagtgtggctcaaaggataatatcaaacacgtcccgggaggcggcagtgtgcaaatagtctacaaaccagttgacctgagcaaggtgacctccaagtgtggctcattaggcaacatccatcataaaccaggaggtggccaggtggaagtaaaatctgagaagcttgacttcaaggacagagtccagtcgaagattgggtccctggacaatatcacccacgtccctggcggaggaaataaaaagattgaaacccacaagctgaccttccgcgagaacgccaaagccaagacagaccacggggcggagatcgtgtacaagtcgccagtggtgtctggggacacgtctccacggcatctcagcaatgtctcctccaccggcagcatcgacatggtagactcgccccagctcgccacgctagctgacgaggtgtctgcctccctggccaagcagggtttgtgatcaggcccctggggcggtcaataattgtggagaggagagaatgagagagtgtggaaaaaaaaagaataatgacccggcccccgccctctgcccccagctgctcctcgcagttcggttaattggttaatcacttaacctgcttttgtcactcggctttggctcgggacttcaaaatcagtgatgggagtaagagcaaatttcatctttccaaattgatgggtgggctagtaataaaatatttaaaaaaaaacattcaaaaacatggccacatccaacatttcctcaggcaattccttttgattcttttttcttccccctccatgtagaagagggagaaggagaggctctgaaagctgcttctgggggatttcaagggactgggggtgccaaccacctctggccctgttgtgggggtgtcacagaggcagtggcagcaacaaaggatttgaaacttggtgtgttcgtggagccacaggcagacgatgtcaaccttgtgtgagtgtgacgggggttggggtggggcgggaggccacgggggaggccgaggcaggggctgggcagaggggagaggaagcacaagaagtgggagtgggagaggaagccacgtgctggagagtagacatccccctccttgccgctgggagagccaaggcctatgccacctgcagcgtctgagcggccgcctgtccttggtggccgggggtgggggcctgctgtgggtcagtgtgccaccctctgcagggcagcctgtgggagaagggacagcgggtaaaaagagaaggcaagctggcaggagggtggcacttcgtggatgacctccttagaaaagactgaccttgatgtcttgagagcgctggcctcttcctccctccctgcagggtagggggcctgagttgaggggcttccctctgctccacagaaaccctgttttattgagttctgaaggttggaactgctgccatgattttggccactttgcagacctgggactttagggctaaccagttctctttgtaaggacttgtgcctcttgggagacgtccacccgtttccaagcctgggccactggcatctctggagtgtgtgggggtctgggaggcaggtcccgagccccctgtccttcccacggccactgcagtcaccccgtctgcgccgctgtgctgttgtctgccgtgagagcccaatcactgcctatacccctcatcacacgtcacaatgtcccgaattcccagcctcaccaccccttctcagtaatgaccctggttggttgcaggaggtacctactccatactgagggtgaaattaagggaaggcaaagtccaggcacaagagtgggaccccagcctctcactctcagttccactcatccaactgggaccctcaccacgaatctcatgatctgattcggttccctgtctcctcctcccgtcacagatgtgagccagggcactgctcagctgtgaccctaggtgtttctgccttgttgacatggagagagccctttcccctgagaaggcctggccccttcctgtgctgagcccacagcagcaggctgggtgtcttggttgtcagtggtggcaccaggatggaagggcaaggcacccagggcaggcccacagtcccgctgtcccccacttgcaccctagcttgtagctgccaacctcccagacagcccagcccgctgctcagctccacatgcatagtatcagccctccacacccgacaaaggggaacacacccccttggaaatggttcttttcccccagtcccagctggaagccatgctgtctgttctgctggagcagctgaacatatacatagatgttgccctgccctccccatctgcaccctgttgagttgtagttggatttgtctgtttatgcttggattcaccagagtgactatgatagtgaaaagaaaaaaaaaaaaaaaaaaggacgcatgtatcttgaaatgcttgtaaagaggtttctaacccaccctcacgaggtgtctctcacccccacactgggactcgtgtggcctgtgtggtgccaccctgctggggcctcccaagttttgaaaggctttcctcagcacctgggacccaacagagaccagcttctagcagctaaggaggccgttcagctgtgacgaaggcctgaagcacaggattaggactgaagcgatgatgtccccttccctacttccccttggggctccctgtgtcagggcacagactaggtcttgtggctggtctggcttgcggcgcgaggatggttctctctggtcatagcccgaagtctcatggcagtcccaaaggaggcttacaactcctgcatcacaagaaaaaggaagccactgccagctggggggatctgcagctcccagaagctccgtgagcctcagccacccctcagactgggttcctctccaagctcgccctctggaggggcagcgcagcctcccaccaagggccctgcgaccacagcagggattgggatgaattgcctgtcctggatctgctctagaggcccaagctgcctgcctgaggaaggatgacttgacaagtcaggagacactgttcccaaagccttgaccagagcacctcagcccgctgaccttgcacaaactccatctgctgccatgagaaaagggaagccgcctttgcaaaacattgctgcctaaagaaactcagcagcctcaggcccaattctgccacttctggtttgggtacagttaaaggcaaccctgagggacttggcagtagaaatccagggcctcccctggggctggcagcttcgtgtgcagctagagctttacctgaaaggaagtctctgggcccagaactctccaccaagagcctccctgccgttcgctgagtcccagcaattctcctaagttgaagggatctgagaaggagaaggaaatgtggggtagatttggtggtggttagagatatgcccccctcattactgccaacagtttcggctgcatttcttcacgcacctcggttcctcttcctgaagttcttgtgccctgctcttcagcaccatgggccttcttatacggaaggctctgggatctcccccttgtggggcaggctcttggggccagcctaagatcatggtttagggtgatcagtgctggcagataaattgaaaaggcacgctggcttgtgatcttaaatgaggacaatccccccagggctgggcactcctcccctcccctcacttctcccacctgcagagccagtgtccttgggtgggctagataggatatactgtatgccggctccttcaagctgctgactcactttatcaatagttccatttaaattgacttcagtggtgagactgtatcctgtttgctattgcttgttgtgctatggggggaggggggaggaatgtgtaagatagttaacatgggcaaagggagatcttggggtgcagcacttaaactgcctcgtaacccttttcatgatttcaaccacatttgctagagggagggagcagccacggagttagaggcccttggggtttctcttttccactgacaggctttcccaggcagctggctagttcattccctccccagccaggtgcaggcgtaggaatatggacatctggttgctttggcctgctgccctctttcaggggtcctaagcccacaatcatgcctccctaagaccttggcatccttccctctaagccgttggcacctctgtgccacctctcacactggctccagacacacagcctgtgcttttggagctgagatcactcgcttcaccctcctcatctttgttctccaagtaaagccacgaggtcggggcgagggcagaggtgatcacctgcgtgtcccatctacagacctgcagcttcataaaacttctgatttctcttcagctttgaaaagggttaccctgggcactggcctagagcctcacctcctaatagacttagccccatgagtttgccatgttgagcaggactatttctggcacttgcaagtcccatgatttcttcggtaattctgagggtggggggagggacatgaaatcatcttagcttagctttctgtctgtgaatgtctatatagtgtattgtgtgttttaacaaatgatttacactgactgttgctgtaaaagtgaatttggaaataaagttattactctgattaaa

SEQ ID NO: 301583 - RNA, 6728 nt, Homo sapiens
  source 1..6728: mol_type = mRNA
gcagtcaccgccacccaccagctccggcaccaacagcagcgccgctgccaccgcccaccttctgccgccgccaccacagccaccttctcctcctccgctgtcctctcccgtcctcgcctctgtcgactatcaggtgaactttgaaccaggatggctgagccccgccaggagttcgaagtgatggaagatcacgctgggacgtacgggttgggggacaggaaagatcaggggggctacaccatgcaccaagaccaagagggtgacacggacgctggcctgaaagctgaagaagcaggcattggagacacccccagcctggaagacgaagctgctggtcacgtgacccaagaggagttgagagttccgggccggcagaggaaggcgcctgaaaggcccctggccaatgagattagcgcccacgtccagcctggaccctgcggagaggcctctggggtctctgggccgtgcctcggggagaaagagccagaagctcccgtcccgctgaccgcgagccttcctcagcaccgtcccgtttgcccagcgcctcctccaacaggaggccctcaggagccctccctggagtggggacaaaaaggcggggactgggccgagaagggtccggcctttccgaagcccgccaccactgcgtatctccacacagagcctgaaagtggtaaggtggtccaggaaggcttcctccgagagccaggccccccaggtctgagccaccagctcatgtccggcatgcctggggctcccctcctgcctgagggccccagagaggccacacgccaaccttcggggacaggacctgaggacacagagggcggccgccacgcccctgagctgctcaagcaccagcttctaggagacctgcaccaggaggggccgccgctgaagggggcagggggcaaagagaggccggggagcaaggaggaggtggatgaagaccgcgacgtcgatgagtcctccccccaagactcccctccctccaaggcctccccagcccaagatgggcggcctccccagacagccgccagagaagccaccagcatcccaggcttcccagcggagggtgccatccccctccctgtggatttcctctccaaagtttccacagagatcccagcctcagagcccgacgggcccagtgtagggcgggccaaagggcaggatgcccccctggagttcacgtttcacgtggaaatcacacccaacgtgcagaaggagcaggcgcactcggaggagcatttgggaagggctgcatttccaggggcccctggagaggggccagaggcccggggcccctctttgggagaggacacaaaagaggctgaccttccagagccctctgaaaagcagcctgctgctgctccgcgggggaagcccgtcagccgggtccctcaactcaaagctcgcatggtcagtaaaagcaaagacgggactggaagcgatgacaaaaaagccaagacatccacacgttcctctgctaaaaccttgaaaaataggccttgccttagccccaaacaccccactcctggtagctcagaccctctgatccaaccctccagccctgctgtgtgcccagagccaccttcctctcctaaatacgtctcttctgtcacttcccgaactggcagttctggagcaaaggagatgaaactcaagggggctgatggtaaaacgaagatcgccacaccgcggggagcagcccctccaggccagaagggccaggccaacgccaccaggattccagcaaaaaccccgcccgctccaaagacaccacccagctctggtgaacctccaaaatcaggggatcgcagcggctacagcagccccggctccccaggcactcccggcagccgctcccgcaccccgtcccttccaaccccacccacccgggagcccaagaaggtggcagtggtccgtactccacccaagtcgccgtcttccgccaagagccgcctgcagacagcccccgtgcccatgccagacctgaagaatgtcaagtccaagatcggctccactgagaacctgaagcaccagccgggaggcgggaaggtgcagataattaataagaagctggatcttagcaacgtccagtccaagtgtggctcaaaggataatatcaaacacgtcccgggaggcggcagtgtgcaaatagtctacaaaccagttgacctgagcaaggtgacctccaagtgtggctcattaggcaacatccatcataaaccaggaggtggccaggtggaagtaaaatctgagaagcttgacttcaaggacagagtccagtcgaagattgggtccctggacaatatcacccacgtccctggcggaggaaataaaaagattgaaacccacaagctgaccttccgcgagaacgccaaagccaagacagaccacggggcggagatcgtgtacaagtcgccagtggtgtctggggacacgtctccacggcatctcagcaatgtctcctccaccggcagcatcgacatggtagactcgccccagctcgccacgctagctgacgaggtgtctgcctccctggccaagcagggtttgtgatcaggcccctggggcggtcaataattgtggagaggagagaatgagagagtgtggaaaaaaaaagaataatgacccggcccccgccctctgcccccagctgctcctcgcagttcggttaattggttaatcacttaacctgcttttgtcactcggctttggctcgggacttcaaaatcagtgatgggagtaagagcaaatttcatctttccaaattgatgggtgggctagtaataaaatatttaaaaaaaaacattcaaaaacatggccacatccaacatttcctcaggcaattccttttgattcttttttcttccccctccatgtagaagagggagaaggagaggctctgaaagctgcttctgggggatttcaagggactgggggtgccaaccacctctggccctgttgtgggggtgtcacagaggcagtggcagcaacaaaggatttgaaacttggtgtgttcgtggagccacaggcagacgatgtcaaccttgtgtgagtgtgacgggggttggggtggggcgggaggccacgggggaggccgaggcaggggctgggcagaggggagaggaagcacaagaagtgggagtgggagaggaagccacgtgctggagagtagacatccccctccttgccgctgggagagccaaggcctatgccacctgcagcgtctgagcggccgcctgtccttggtggccgggggtgggggcctgctgtgggtcagtgtgccaccctctgcagggcagcctgtgggagaagggacagcgggtaaaaagagaaggcaagctggcaggagggtggcacttcgtggatgacctccttagaaaagactgaccttgatgtcttgagagcgctggcctcttcctccctccctgcagggtagggggcctgagttgaggggcttccctctgctccacagaaaccctgttttattgagttctgaaggttggaactgctgccatgattttggccactttgcagacctgggactttagggctaaccagttctctttgtaaggacttgtgcctcttgggagacgtccacccgtttccaagcctgggccactggcatctctggagtgtgtgggggtctgggaggcaggtcccgagccccctgtccttcccacggccactgcagtcaccccgtctgcgccgctgtgctgttgtctgccgtgagagcccaatcactgcctatacccctcatcacacgtcacaatgtcccgaattcccagcctcaccaccccttctcagtaatgaccctggttggttgcaggaggtacctactccatactgagggtgaaattaagggaaggcaaagtccaggcacaagagtgggaccccagcctctcactctcagttccactcatccaactgggaccctcaccacgaatctcatgatctgattcggttccctgtctcctcctcccgtcacagatgtgagccagggcactgctcagctgtgaccctaggtgtttctgccttgttgacatggagagagccctttcccctgagaaggcctggccccttcctgtgctgagcccacagcagcaggctgggtgtcttggttgtcagtggtggcaccaggatggaagggcaaggcacccagggcaggcccacagtcccgctgtcccccacttgcaccctagcttgtagctgccaacctcccagacagcccagcccgctgctcagctccacatgcatagtatcagccctccacacccgacaaaggggaacacacccccttggaaatggttcttttcccccagtcccagctggaagccatgctgtctgttctgctggagcagctgaacatatacatagatgttgccctgccctccccatctgcaccctgttgagttgtagttggatttgtctgtttatgcttggattcaccagagtgactatgatagtgaaaagaaaaaaaaaaaaaaaaaaggacgcatgtatcttgaaatgcttgtaaagaggtttctaacccaccctcacgaggtgtctctcacccccacactgggactcgtgtggcctgtgtggtgccaccctgctggggcctcccaagttttgaaaggctttcctcagcacctgggacccaacagagaccagcttctagcagctaaggaggccgttcagctgtgacgaaggcctgaagcacaggattaggactgaagcgatgatgtccccttccctacttccccttggggctccctgtgtcagggcacagactaggtcttgtggctggtctggcttgcggcgcgaggatggttctctctggtcatagcccgaagtctcatggcagtcccaaaggaggcttacaactcctgcatcacaagaaaaaggaagccactgccagctggggggatctgcagctcccagaagctccgtgagcctcagccacccctcagactgggttcctctccaagctcgccctctggaggggcagcgcagcctcccaccaagggccctgcgaccacagcagggattgggatgaattgcctgtcctggatctgctctagaggcccaagctgcctgcctgaggaaggatgacttgacaagtcaggagacactgttcccaaagccttgaccagagcacctcagcccgctgaccttgcacaaactccatctgctgccatgagaaaagggaagccgcctttgcaaaacattgctgcctaaagaaactcagcagcctcaggcccaattctgccacttctggtttgggtacagttaaaggcaaccctgagggacttggcagtagaaatccagggcctcccctggggctggcagcttcgtgtgcagctagagctttacctgaaaggaagtctctgggcccagaactctccaccaagagcctccctgccgttcgctgagtcccagcaattctcctaagttgaagggatctgagaaggagaaggaaatgtggggtagatttggtggtggttagagatatgcccccctcattactgccaacagtttcggctgcatttcttcacgcacctcggttcctcttcctgaagttcttgtgccctgctcttcagcaccatgggccttcttatacggaaggctctgggatctcccccttgtggggcaggctcttggggccagcctaagatcatggtttagggtgatcagtgctggcagataaattgaaaaggcacgctggcttgtgatcttaaatgaggacaatccccccagggctgggcactcctcccctcccctcacttctcccacctgcagagccagtgtccttgggtgggctagataggatatactgtatgccggctccttcaagctgctgactcactttatcaatagttccatttaaattgacttcagtggtgagactgtatcctgtttgctattgcttgttgtgctatggggggaggggggaggaatgtgtaagatagttaacatgggcaaagggagatcttggggtgcagcacttaaactgcctcgtaacccttttcatgatttcaaccacatttgctagagggagggagcagccacggagttagaggcccttggggtttctcttttccactgacaggctttcccaggcagctggctagttcattccctccccagccaggtgcaggcgtaggaatatggacatctggttgctttggcctgctgccctctttcaggggtcctaagcccacaatcatgcctccctaagaccttggcatccttccctctaagccgttggcacctctgtgccacctctcacactggctccagacacacagcctgtgcttttggagctgagatcactcgcttcaccctcctcatctttgttctccaagtaaagccacgaggtcggggcgagggcagaggtgatcacctgcgtgtcccatctacagacctgcagcttcataaaacttctgatttctcttcagctttgaaaagggttaccctgggcactggcctagagcctcacctcctaatagacttagccccatgagtttgccatgttgagcaggactatttctggcacttgcaagtcccatgatttcttcggtaattctgagggtggggggagggacatgaaatcatcttagcttagctttctgtctgtgaatgtctatatagtgtattgtgtgttttaacaaatgatttacactgactgttgctgtaaaagtgaatttggaaataaagttattactctgattaaa

SEQ ID NO: 301584 - RNA, 6902 nt, Homo sapiens
  source 1..6902: mol_type = mRNA
gcagtcaccgccacccaccagctccggcaccaacagcagcgccgctgccaccgcccaccttctgccgccgccaccacagccaccttctcctcctccgctgtcctctcccgtcctcgcctctgtcgactatcaggtgaactttgaaccaggatggctgagccccgccaggagttcgaagtgatggaagatcacgctgggacgtacgggttgggggacaggaaagatcaggggggctacaccatgcaccaagaccaagagggtgacacggacgctggcctgaaagaatctcccctgcagacccccactgaggacggatctgaggaaccgggctctgaaacctctgatgctaagagcactccaacagcggaagatgtgacagcacccttagtggatgagggagctcccggcaagcaggctgccgcgcagccccacacggagatcccagaaggaaccacagctgaagaagcaggcattggagacacccccagcctggaagacgaagctgctggtcacgtgacccaagaggagttgagagttccgggccggcagaggaaggcgcctgaaaggcccctggccaatgagattagcgcccacgtccagcctggaccctgcggagaggcctctggggtctctgggccgtgcctcggggagaaagagccagaagctcccgtcccgctgaccgcgagccttcctcagcaccgtcccgtttgcccagcgcctcctccaacaggaggccctcaggagccctccctggagtggggacaaaaaggcggggactgggccgagaagggtccggcctttccgaagcccgccaccactgcgtatctccacacagagcctgaaagtggtaaggtggtccaggaaggcttcctccgagagccaggccccccaggtctgagccaccagctcatgtccggcatgcctggggctcccctcctgcctgagggccccagagaggccacacgccaaccttcggggacaggacctgaggacacagagggcggccgccacgcccctgagctgctcaagcaccagcttctaggagacctgcaccaggaggggccgccgctgaagggggcagggggcaaagagaggccggggagcaaggaggaggtggatgaagaccgcgacgtcgatgagtcctccccccaagactcccctccctccaaggcctccccagcccaagatgggcggcctccccagacagccgccagagaagccaccagcatcccaggcttcccagcggagggtgccatccccctccctgtggatttcctctccaaagtttccacagagatcccagcctcagagcccgacgggcccagtgtagggcgggccaaagggcaggatgcccccctggagttcacgtttcacgtggaaatcacacccaacgtgcagaaggagcaggcgcactcggaggagcatttgggaagggctgcatttccaggggcccctggagaggggccagaggcccggggcccctctttgggagaggacacaaaagaggctgaccttccagagccctctgaaaagcagcctgctgctgctccgcgggggaagcccgtcagccgggtccctcaactcaaagctcgcatggtcagtaaaagcaaagacgggactggaagcgatgacaaaaaagccaagacatccacacgttcctctgctaaaaccttgaaaaataggccttgccttagccccaaacaccccactcctggtagctcagaccctctgatccaaccctccagccctgctgtgtgcccagagccaccttcctctcctaaatacgtctcttctgtcacttcccgaactggcagttctggagcaaaggagatgaaactcaagggggctgatggtaaaacgaagatcgccacaccgcggggagcagcccctccaggccagaagggccaggccaacgccaccaggattccagcaaaaaccccgcccgctccaaagacaccacccagctctggtgaacctccaaaatcaggggatcgcagcggctacagcagccccggctccccaggcactcccggcagccgctcccgcaccccgtcccttccaaccccacccacccgggagcccaagaaggtggcagtggtccgtactccacccaagtcgccgtcttccgccaagagccgcctgcagacagcccccgtgcccatgccagacctgaagaatgtcaagtccaagatcggctccactgagaacctgaagcaccagccgggaggcgggaaggtgcagataattaataagaagctggatcttagcaacgtccagtccaagtgtggctcaaaggataatatcaaacacgtcccgggaggcggcagtgtgcaaatagtctacaaaccagttgacctgagcaaggtgacctccaagtgtggctcattaggcaacatccatcataaaccaggaggtggccaggtggaagtaaaatctgagaagcttgacttcaaggacagagtccagtcgaagattgggtccctggacaatatcacccacgtccctggcggaggaaataaaaagattgaaacccacaagctgaccttccgcgagaacgccaaagccaagacagaccacggggcggagatcgtgtacaagtcgccagtggtgtctggggacacgtctccacggcatctcagcaatgtctcctccaccggcagcatcgacatggtagactcgccccagctcgccacgctagctgacgaggtgtctgcctccctggccaagcagggtttgtgatcaggcccctggggcggtcaataattgtggagaggagagaatgagagagtgtggaaaaaaaaagaataatgacccggcccccgccctctgcccccagctgctcctcgcagttcggttaattggttaatcacttaacctgcttttgtcactcggctttggctcgggacttcaaaatcagtgatgggagtaagagcaaatttcatctttccaaattgatgggtgggctagtaataaaatatttaaaaaaaaacattcaaaaacatggccacatccaacatttcctcaggcaattccttttgattcttttttcttccccctccatgtagaagagggagaaggagaggctctgaaagctgcttctgggggatttcaagggactgggggtgccaaccacctctggccctgttgtgggggtgtcacagaggcagtggcagcaacaaaggatttgaaacttggtgtgttcgtggagccacaggcagacgatgtcaaccttgtgtgagtgtgacgggggttggggtggggcgggaggccacgggggaggccgaggcaggggctgggcagaggggagaggaagcacaagaagtgggagtgggagaggaagccacgtgctggagagtagacatccccctccttgccgctgggagagccaaggcctatgccacctgcagcgtctgagcggccgcctgtccttggtggccgggggtgggggcctgctgtgggtcagtgtgccaccctctgcagggcagcctgtgggagaagggacagcgggtaaaaagagaaggcaagctggcaggagggtggcacttcgtggatgacctccttagaaaagactgaccttgatgtcttgagagcgctggcctcttcctccctccctgcagggtagggggcctgagttgaggggcttccctctgctccacagaaaccctgttttattgagttctgaaggttggaactgctgccatgattttggccactttgcagacctgggactttagggctaaccagttctctttgtaaggacttgtgcctcttgggagacgtccacccgtttccaagcctgggccactggcatctctggagtgtgtgggggtctgggaggcaggtcccgagccccctgtccttcccacggccactgcagtcaccccgtctgcgccgctgtgctgttgtctgccgtgagagcccaatcactgcctatacccctcatcacacgtcacaatgtcccgaattcccagcctcaccaccccttctcagtaatgaccctggttggttgcaggaggtacctactccatactgagggtgaaattaagggaaggcaaagtccaggcacaagagtgggaccccagcctctcactctcagttccactcatccaactgggaccctcaccacgaatctcatgatctgattcggttccctgtctcctcctcccgtcacagatgtgagccagggcactgctcagctgtgaccctaggtgtttctgccttgttgacatggagagagccctttcccctgagaaggcctggccccttcctgtgctgagcccacagcagcaggctgggtgtcttggttgtcagtggtggcaccaggatggaagggcaaggcacccagggcaggcccacagtcccgctgtcccccacttgcaccctagcttgtagctgccaacctcccagacagcccagcccgctgctcagctccacatgcatagtatcagccctccacacccgacaaaggggaacacacccccttggaaatggttcttttcccccagtcccagctggaagccatgctgtctgttctgctggagcagctgaacatatacatagatgttgccctgccctccccatctgcaccctgttgagttgtagttggatttgtctgtttatgcttggattcaccagagtgactatgatagtgaaaagaaaaaaaaaaaaaaaaaaggacgcatgtatcttgaaatgcttgtaaagaggtttctaacccaccctcacgaggtgtctctcacccccacactgggactcgtgtggcctgtgtggtgccaccctgctggggcctcccaagttttgaaaggctttcctcagcacctgggacccaacagagaccagcttctagcagctaaggaggccgttcagctgtgacgaaggcctgaagcacaggattaggactgaagcgatgatgtccccttccctacttccccttggggctccctgtgtcagggcacagactaggtcttgtggctggtctggcttgcggcgcgaggatggttctctctggtcatagcccgaagtctcatggcagtcccaaaggaggcttacaactcctgcatcacaagaaaaaggaagccactgccagctggggggatctgcagctcccagaagctccgtgagcctcagccacccctcagactgggttcctctccaagctcgccctctggaggggcagcgcagcctcccaccaagggccctgcgaccacagcagggattgggatgaattgcctgtcctggatctgctctagaggcccaagctgcctgcctgaggaaggatgacttgacaagtcaggagacactgttcccaaagccttgaccagagcacctcagcccgctgaccttgcacaaactccatctgctgccatgagaaaagggaagccgcctttgcaaaacattgctgcctaaagaaactcagcagcctcaggcccaattctgccacttctggtttgggtacagttaaaggcaaccctgagggacttggcagtagaaatccagggcctcccctggggctggcagcttcgtgtgcagctagagctttacctgaaaggaagtctctgggcccagaactctccaccaagagcctccctgccgttcgctgagtcccagcaattctcctaagttgaagggatctgagaaggagaaggaaatgtggggtagatttggtggtggttagagatatgcccccctcattactgccaacagtttcggctgcatttcttcacgcacctcggttcctcttcctgaagttcttgtgccctgctcttcagcaccatgggccttcttatacggaaggctctgggatctcccccttgtggggcaggctcttggggccagcctaagatcatggtttagggtgatcagtgctggcagataaattgaaaaggcacgctggcttgtgatcttaaatgaggacaatccccccagggctgggcactcctcccctcccctcacttctcccacctgcagagccagtgtccttgggtgggctagataggatatactgtatgccggctccttcaagctgctgactcactttatcaatagttccatttaaattgacttcagtggtgagactgtatcctgtttgctattgcttgttgtgctatggggggaggggggaggaatgtgtaagatagttaacatgggcaaagggagatcttggggtgcagcacttaaactgcctcgtaacccttttcatgatttcaaccacatttgctagagggagggagcagccacggagttagaggcccttggggtttctcttttccactgacaggctttcccaggcagctggctagttcattccctccccagccaggtgcaggcgtaggaatatggacatctggttgctttggcctgctgccctctttcaggggtcctaagcccacaatcatgcctccctaagaccttggcatccttccctctaagccgttggcacctctgtgccacctctcacactggctccagacacacagcctgtgcttttggagctgagatcactcgcttcaccctcctcatctttgttctccaagtaaagccacgaggtcggggcgagggcagaggtgatcacctgcgtgtcccatctacagacctgcagcttcataaaacttctgatttctcttcagctttgaaaagggttaccctgggcactggcctagagcctcacctcctaatagacttagccccatgagtttgccatgttgagcaggactatttctggcacttgcaagtcccatgatttcttcggtaattctgagggtggggggagggacatgaaatcatcttagcttagctttctgtctgtgaatgtctatatagtgtattgtgtgttttaacaaatgatttacactgactgttgctgtaaaagtgaatttggaaataaagttattactctgattaaa

SEQ ID NO: 301585 - RNA, 6809 nt, Homo sapiens
  source 1..6809: mol_type = mRNA
gcagtcaccgccacccaccagctccggcaccaacagcagcgccgctgccaccgcccaccttctgccgccgccaccacagccaccttctcctcctccgctgtcctctcccgtcctcgcctctgtcgactatcaggtgaactttgaaccaggatggctgagccccgccaggagttcgaagtgatggaagatcacgctgggacgtacgggttgggggacaggaaagatcaggggggctacaccatgcaccaagaccaagagggtgacacggacgctggcctgaaagaatctcccctgcagacccccactgaggacggatctgaggaaccgggctctgaaacctctgatgctaagagcactccaacagcggaagatgtgacagcacccttagtggatgagggagctcccggcaagcaggctgccgcgcagccccacacggagatcccagaaggaaccacagctgaagaagcaggcattggagacacccccagcctggaagacgaagctgctggtcacgtgacccaagaggagttgagagttccgggccggcagaggaaggcgcctgaaaggcccctggccaatgagattagcgcccacgtccagcctggaccctgcggagaggcctctggggtctctgggccgtgcctcggggagaaagagccagaagctcccgtcccgctgaccgcgagccttcctcagcaccgtcccgtttgcccagcgcctcctccaacaggaggccctcaggagccctccctggagtggggacaaaaaggcggggactgggccgagaagggtccggcctttccgaagcccgccaccactgcgtatctccacacagagcctgaaagtggtaaggtggtccaggaaggcttcctccgagagccaggccccccaggtctgagccaccagctcatgtccggcatgcctggggctcccctcctgcctgagggccccagagaggccacacgccaaccttcggggacaggacctgaggacacagagggcggccgccacgcccctgagctgctcaagcaccagcttctaggagacctgcaccaggaggggccgccgctgaagggggcagggggcaaagagaggccggggagcaaggaggaggtggatgaagaccgcgacgtcgatgagtcctccccccaagactcccctccctccaaggcctccccagcccaagatgggcggcctccccagacagccgccagagaagccaccagcatcccaggcttcccagcggagggtgccatccccctccctgtggatttcctctccaaagtttccacagagatcccagcctcagagcccgacgggcccagtgtagggcgggccaaagggcaggatgcccccctggagttcacgtttcacgtggaaatcacacccaacgtgcagaaggagcaggcgcactcggaggagcatttgggaagggctgcatttccaggggcccctggagaggggccagaggcccggggcccctctttgggagaggacacaaaagaggctgaccttccagagccctctgaaaagcagcctgctgctgctccgcgggggaagcccgtcagccgggtccctcaactcaaagctcgcatggtcagtaaaagcaaagacgggactggaagcgatgacaaaaaagccaagacatccacacgttcctctgctaaaaccttgaaaaataggccttgccttagccccaaacaccccactcctggtagctcagaccctctgatccaaccctccagccctgctgtgtgcccagagccaccttcctctcctaaatacgtctcttctgtcacttcccgaactggcagttctggagcaaaggagatgaaactcaagggggctgatggtaaaacgaagatcgccacaccgcggggagcagcccctccaggccagaagggccaggccaacgccaccaggattccagcaaaaaccccgcccgctccaaagacaccacccagctctggtgaacctccaaaatcaggggatcgcagcggctacagcagccccggctccccaggcactcccggcagccgctcccgcaccccgtcccttccaaccccacccacccgggagcccaagaaggtggcagtggtccgtactccacccaagtcgccgtcttccgccaagagccgcctgcagacagcccccgtgcccatgccagacctgaagaatgtcaagtccaagatcggctccactgagaacctgaagcaccagccgggaggcgggaaggtgcaaatagtctacaaaccagttgacctgagcaaggtgacctccaagtgtggctcattaggcaacatccatcataaaccaggaggtggccaggtggaagtaaaatctgagaagcttgacttcaaggacagagtccagtcgaagattgggtccctggacaatatcacccacgtccctggcggaggaaataaaaagattgaaacccacaagctgaccttccgcgagaacgccaaagccaagacagaccacggggcggagatcgtgtacaagtcgccagtggtgtctggggacacgtctccacggcatctcagcaatgtctcctccaccggcagcatcgacatggtagactcgccccagctcgccacgctagctgacgaggtgtctgcctccctggccaagcagggtttgtgatcaggcccctggggcggtcaataattgtggagaggagagaatgagagagtgtggaaaaaaaaagaataatgacccggcccccgccctctgcccccagctgctcctcgcagttcggttaattggttaatcacttaacctgcttttgtcactcggctttggctcgggacttcaaaatcagtgatgggagtaagagcaaatttcatctttccaaattgatgggtgggctagtaataaaatatttaaaaaaaaacattcaaaaacatggccacatccaacatttcctcaggcaattccttttgattcttttttcttccccctccatgtagaagagggagaaggagaggctctgaaagctgcttctgggggatttcaagggactgggggtgccaaccacctctggccctgttgtgggggtgtcacagaggcagtggcagcaacaaaggatttgaaacttggtgtgttcgtggagccacaggcagacgatgtcaaccttgtgtgagtgtgacgggggttggggtggggcgggaggccacgggggaggccgaggcaggggctgggcagaggggagaggaagcacaagaagtgggagtgggagaggaagccacgtgctggagagtagacatccccctccttgccgctgggagagccaaggcctatgccacctgcagcgtctgagcggccgcctgtccttggtggccgggggtgggggcctgctgtgggtcagtgtgccaccctctgcagggcagcctgtgggagaagggacagcgggtaaaaagagaaggcaagctggcaggagggtggcacttcgtggatgacctccttagaaaagactgaccttgatgtcttgagagcgctggcctcttcctccctccctgcagggtagggggcctgagttgaggggcttccctctgctccacagaaaccctgttttattgagttctgaaggttggaactgctgccatgattttggccactttgcagacctgggactttagggctaaccagttctctttgtaaggacttgtgcctcttgggagacgtccacccgtttccaagcctgggccactggcatctctggagtgtgtgggggtctgggaggcaggtcccgagccccctgtccttcccacggccactgcagtcaccccgtctgcgccgctgtgctgttgtctgccgtgagagcccaatcactgcctatacccctcatcacacgtcacaatgtcccgaattcccagcctcaccaccccttctcagtaatgaccctggttggttgcaggaggtacctactccatactgagggtgaaattaagggaaggcaaagtccaggcacaagagtgggaccccagcctctcactctcagttccactcatccaactgggaccctcaccacgaatctcatgatctgattcggttccctgtctcctcctcccgtcacagatgtgagccagggcactgctcagctgtgaccctaggtgtttctgccttgttgacatggagagagccctttcccctgagaaggcctggccccttcctgtgctgagcccacagcagcaggctgggtgtcttggttgtcagtggtggcaccaggatggaagggcaaggcacccagggcaggcccacagtcccgctgtcccccacttgcaccctagcttgtagctgccaacctcccagacagcccagcccgctgctcagctccacatgcatagtatcagccctccacacccgacaaaggggaacacacccccttggaaatggttcttttcccccagtcccagctggaagccatgctgtctgttctgctggagcagctgaacatatacatagatgttgccctgccctccccatctgcaccctgttgagttgtagttggatttgtctgtttatgcttggattcaccagagtgactatgatagtgaaaagaaaaaaaaaaaaaaaaaaggacgcatgtatcttgaaatgcttgtaaagaggtttctaacccaccctcacgaggtgtctctcacccccacactgggactcgtgtggcctgtgtggtgccaccctgctggggcctcccaagttttgaaaggctttcctcagcacctgggacccaacagagaccagcttctagcagctaaggaggccgttcagctgtgacgaaggcctgaagcacaggattaggactgaagcgatgatgtccccttccctacttccccttggggctccctgtgtcagggcacagactaggtcttgtggctggtctggcttgcggcgcgaggatggttctctctggtcatagcccgaagtctcatggcagtcccaaaggaggcttacaactcctgcatcacaagaaaaaggaagccactgccagctggggggatctgcagctcccagaagctccgtgagcctcagccacccctcagactgggttcctctccaagctcgccctctggaggggcagcgcagcctcccaccaagggccctgcgaccacagcagggattgggatgaattgcctgtcctggatctgctctagaggcccaagctgcctgcctgaggaaggatgacttgacaagtcaggagacactgttcccaaagccttgaccagagcacctcagcccgctgaccttgcacaaactccatctgctgccatgagaaaagggaagccgcctttgcaaaacattgctgcctaaagaaactcagcagcctcaggcccaattctgccacttctggtttgggtacagttaaaggcaaccctgagggacttggcagtagaaatccagggcctcccctggggctggcagcttcgtgtgcagctagagctttacctgaaaggaagtctctgggcccagaactctccaccaagagcctccctgccgttcgctgagtcccagcaattctcctaagttgaagggatctgagaaggagaaggaaatgtggggtagatttggtggtggttagagatatgcccccctcattactgccaacagtttcggctgcatttcttcacgcacctcggttcctcttcctgaagttcttgtgccctgctcttcagcaccatgggccttcttatacggaaggctctgggatctcccccttgtggggcaggctcttggggccagcctaagatcatggtttagggtgatcagtgctggcagataaattgaaaaggcacgctggcttgtgatcttaaatgaggacaatccccccagggctgggcactcctcccctcccctcacttctcccacctgcagagccagtgtccttgggtgggctagataggatatactgtatgccggctccttcaagctgctgactcactttatcaatagttccatttaaattgacttcagtggtgagactgtatcctgtttgctattgcttgttgtgctatggggggaggggggaggaatgtgtaagatagttaacatgggcaaagggagatcttggggtgcagcacttaaactgcctcgtaacccttttcatgatttcaaccacatttgctagagggagggagcagccacggagttagaggcccttggggtttctcttttccactgacaggctttcccaggcagctggctagttcattccctccccagccaggtgcaggcgtaggaatatggacatctggttgctttggcctgctgccctctttcaggggtcctaagcccacaatcatgcctccctaagaccttggcatccttccctctaagccgttggcacctctgtgccacctctcacactggctccagacacacagcctgtgcttttggagctgagatcactcgcttcaccctcctcatctttgttctccaagtaaagccacgaggtcggggcgagggcagaggtgatcacctgcgtgtcccatctacagacctgcagcttcataaaacttctgatttctcttcagctttgaaaagggttaccctgggcactggcctagagcctcacctcctaatagacttagccccatgagtttgccatgttgagcaggactatttctggcacttgcaagtcccatgatttcttcggtaattctgagggtggggggagggacatgaaatcatcttagcttagctttctgtctgtgaatgtctatatagtgtattgtgtgttttaacaaatgatttacactgactgttgctgtaaaagtgaatttggaaataaagttattactctgattaaa

SEQ ID NO: 301586 - RNA, 6704 nt, Homo sapiens
  source 1..6704: mol_type = mRNA
gcagtcaccgccacccaccagctccggcaccaacagcagcgccgctgccaccgcccaccttctgccgccgccaccacagccaccttctcctcctccgctgtcctctcccgtcctcgcctctgtcgactatcaggtgaactttgaaccaggatggctgagccccgccaggagttcgaagtgatggaagatcacgctgggacgtacgggttgggggacaggaaagatcaggggggctacaccatgcaccaagaccaagagggtgacacggacgctggcctgaaagaatctcccctgcagacccccactgaggacggatctgaggaaccgggctctgaaacctctgatgctaagagcactccaacagcggaagatgtgacagcacccttagtggatgagggagctcccggcaagcaggctgccgcgcagccccacacggagatcccagaaggaaccacagctgaagaagcaggcattggagacacccccagcctggaagacgaagctgctggtcacgtgacccaagaggagttgagagttccgggccggcagaggaaggcgcctgaaaggcccctggccaatgagattagcgcccacgtccagcctggaccctgcggagaggcctctggggtctctgggccgtgcctcggggagaaagagccagaagctcccgtcccgctgaccgcgagccttcctcagcaccgtcccgtttgcccagcgcctcctccaacaggaggccctcaggagccctccctggagtggggacaaaaaggcggggactgggccgagaagggtccggcctttccgaagcccgccaccactgcgtatctccacacagagcctgaaagtggtaaggtggtccaggaaggcttcctccgagagccaggccccccaggtctgagccaccagctcatgtccggcatgcctggggctcccctcctgcctgagggccccagagaggccacacgccaaccttcggggacaggacctgaggacacagagggcggccgccacgcccctgagctgctcaagcaccagcttctaggagacctgcaccaggaggggccgccgctgaagggggcagggggcaaagagaggccggggagcaaggaggaggtggatgaagaccgcgacgtcgatgagtcctccccccaagactcccctccctccaaggcctccccagcccaagatgggcggcctccccagacagccgccagagaagccaccagcatcccaggcttcccagcggagggtgccatccccctccctgtggatttcctctccaaagtttccacagagatcccagcctcagagcccgacgggcccagtgtagggcgggccaaagggcaggatgcccccctggagttcacgtttcacgtggaaatcacacccaacgtgcagaaggagcaggcgcactcggaggagcatttgggaagggctgcatttccaggggcccctggagaggggccagaggcccggggcccctctttgggagaggacacaaaagaggctgaccttccagagccctctgaaaagcagcctgctgctgctccgcgggggaagcccgtcagccgggtccctcaactcaaagctcgcatggtcagtaaaagcaaagacgggactggaagcgatgacaaaaaagccaagggggctgatggtaaaacgaagatcgccacaccgcggggagcagcccctccaggccagaagggccaggccaacgccaccaggattccagcaaaaaccccgcccgctccaaagacaccacccagctctggtgaacctccaaaatcaggggatcgcagcggctacagcagccccggctccccaggcactcccggcagccgctcccgcaccccgtcccttccaaccccacccacccgggagcccaagaaggtggcagtggtccgtactccacccaagtcgccgtcttccgccaagagccgcctgcagacagcccccgtgcccatgccagacctgaagaatgtcaagtccaagatcggctccactgagaacctgaagcaccagccgggaggcgggaaggtgcagataattaataagaagctggatcttagcaacgtccagtccaagtgtggctcaaaggataatatcaaacacgtcccgggaggcggcagtgtgcaaatagtctacaaaccagttgacctgagcaaggtgacctccaagtgtggctcattaggcaacatccatcataaaccaggaggtggccaggtggaagtaaaatctgagaagcttgacttcaaggacagagtccagtcgaagattgggtccctggacaatatcacccacgtccctggcggaggaaataaaaagattgaaacccacaagctgaccttccgcgagaacgccaaagccaagacagaccacggggcggagatcgtgtacaagtcgccagtggtgtctggggacacgtctccacggcatctcagcaatgtctcctccaccggcagcatcgacatggtagactcgccccagctcgccacgctagctgacgaggtgtctgcctccctggccaagcagggtttgtgatcaggcccctggggcggtcaataattgtggagaggagagaatgagagagtgtggaaaaaaaaagaataatgacccggcccccgccctctgcccccagctgctcctcgcagttcggttaattggttaatcacttaacctgcttttgtcactcggctttggctcgggacttcaaaatcagtgatgggagtaagagcaaatttcatctttccaaattgatgggtgggctagtaataaaatatttaaaaaaaaacattcaaaaacatggccacatccaacatttcctcaggcaattccttttgattcttttttcttccccctccatgtagaagagggagaaggagaggctctgaaagctgcttctgggggatttcaagggactgggggtgccaaccacctctggccctgttgtgggggtgtcacagaggcagtggcagcaacaaaggatttgaaacttggtgtgttcgtggagccacaggcagacgatgtcaaccttgtgtgagtgtgacgggggttggggtggggcgggaggccacgggggaggccgaggcaggggctgggcagaggggagaggaagcacaagaagtgggagtgggagaggaagccacgtgctggagagtagacatccccctccttgccgctgggagagccaaggcctatgccacctgcagcgtctgagcggccgcctgtccttggtggccgggggtgggggcctgctgtgggtcagtgtgccaccctctgcagggcagcctgtgggagaagggacagcgggtaaaaagagaaggcaagctggcaggagggtggcacttcgtggatgacctccttagaaaagactgaccttgatgtcttgagagcgctggcctcttcctccctccctgcagggtagggggcctgagttgaggggcttccctctgctccacagaaaccctgttttattgagttctgaaggttggaactgctgccatgattttggccactttgcagacctgggactttagggctaaccagttctctttgtaaggacttgtgcctcttgggagacgtccacccgtttccaagcctgggccactggcatctctggagtgtgtgggggtctgggaggcaggtcccgagccccctgtccttcccacggccactgcagtcaccccgtctgcgccgctgtgctgttgtctgccgtgagagcccaatcactgcctatacccctcatcacacgtcacaatgtcccgaattcccagcctcaccaccccttctcagtaatgaccctggttggttgcaggaggtacctactccatactgagggtgaaattaagggaaggcaaagtccaggcacaagagtgggaccccagcctctcactctcagttccactcatccaactgggaccctcaccacgaatctcatgatctgattcggttccctgtctcctcctcccgtcacagatgtgagccagggcactgctcagctgtgaccctaggtgtttctgccttgttgacatggagagagccctttcccctgagaaggcctggccccttcctgtgctgagcccacagcagcaggctgggtgtcttggttgtcagtggtggcaccaggatggaagggcaaggcacccagggcaggcccacagtcccgctgtcccccacttgcaccctagcttgtagctgccaacctcccagacagcccagcccgctgctcagctccacatgcatagtatcagccctccacacccgacaaaggggaacacacccccttggaaatggttcttttcccccagtcccagctggaagccatgctgtctgttctgctggagcagctgaacatatacatagatgttgccctgccctccccatctgcaccctgttgagttgtagttggatttgtctgtttatgcttggattcaccagagtgactatgatagtgaaaagaaaaaaaaaaaaaaaaaaggacgcatgtatcttgaaatgcttgtaaagaggtttctaacccaccctcacgaggtgtctctcacccccacactgggactcgtgtggcctgtgtggtgccaccctgctggggcctcccaagttttgaaaggctttcctcagcacctgggacccaacagagaccagcttctagcagctaaggaggccgttcagctgtgacgaaggcctgaagcacaggattaggactgaagcgatgatgtccccttccctacttccccttggggctccctgtgtcagggcacagactaggtcttgtggctggtctggcttgcggcgcgaggatggttctctctggtcatagcccgaagtctcatggcagtcccaaaggaggcttacaactcctgcatcacaagaaaaaggaagccactgccagctggggggatctgcagctcccagaagctccgtgagcctcagccacccctcagactgggttcctctccaagctcgccctctggaggggcagcgcagcctcccaccaagggccctgcgaccacagcagggattgggatgaattgcctgtcctggatctgctctagaggcccaagctgcctgcctgaggaaggatgacttgacaagtcaggagacactgttcccaaagccttgaccagagcacctcagcccgctgaccttgcacaaactccatctgctgccatgagaaaagggaagccgcctttgcaaaacattgctgcctaaagaaactcagcagcctcaggcccaattctgccacttctggtttgggtacagttaaaggcaaccctgagggacttggcagtagaaatccagggcctcccctggggctggcagcttcgtgtgcagctagagctttacctgaaaggaagtctctgggcccagaactctccaccaagagcctccctgccgttcgctgagtcccagcaattctcctaagttgaagggatctgagaaggagaaggaaatgtggggtagatttggtggtggttagagatatgcccccctcattactgccaacagtttcggctgcatttcttcacgcacctcggttcctcttcctgaagttcttgtgccctgctcttcagcaccatgggccttcttatacggaaggctctgggatctcccccttgtggggcaggctcttggggccagcctaagatcatggtttagggtgatcagtgctggcagataaattgaaaaggcacgctggcttgtgatcttaaatgaggacaatccccccagggctgggcactcctcccctcccctcacttctcccacctgcagagccagtgtccttgggtgggctagataggatatactgtatgccggctccttcaagctgctgactcactttatcaatagttccatttaaattgacttcagtggtgagactgtatcctgtttgctattgcttgttgtgctatggggggaggggggaggaatgtgtaagatagttaacatgggcaaagggagatcttggggtgcagcacttaaactgcctcgtaacccttttcatgatttcaaccacatttgctagagggagggagcagccacggagttagaggcccttggggtttctcttttccactgacaggctttcccaggcagctggctagttcattccctccccagccaggtgcaggcgtaggaatatggacatctggttgctttggcctgctgccctctttcaggggtcctaagcccacaatcatgcctccctaagaccttggcatccttccctctaagccgttggcacctctgtgccacctctcacactggctccagacacacagcctgtgcttttggagctgagatcactcgcttcaccctcctcatctttgttctccaagtaaagccacgaggtcggggcgagggcagaggtgatcacctgcgtgtcccatctacagacctgcagcttcataaaacttctgatttctcttcagctttgaaaagggttaccctgggcactggcctagagcctcacctcctaatagacttagccccatgagtttgccatgttgagcaggactatttctggcacttgcaagtcccatgatttcttcggtaattctgagggtggggggagggacatgaaatcatcttagcttagctttctgtctgtgaatgtctatatagtgtattgtgtgttttaacaaatgatttacactgactgttgctgtaaaagtgaatttggaaataaagttattactctgattaaa

SEQ ID NO: 301587 - RNA, 6611 nt, Homo sapiens
  source 1..6611: mol_type = mRNA
gcagtcaccgccacccaccagctccggcaccaacagcagcgccgctgccaccgcccaccttctgccgccgccaccacagccaccttctcctcctccgctgtcctctcccgtcctcgcctctgtcgactatcaggtgaactttgaaccaggatggctgagccccgccaggagttcgaagtgatggaagatcacgctgggacgtacgggttgggggacaggaaagatcaggggggctacaccatgcaccaagaccaagagggtgacacggacgctggcctgaaagaatctcccctgcagacccccactgaggacggatctgaggaaccgggctctgaaacctctgatgctaagagcactccaacagcggaagatgtgacagcacccttagtggatgagggagctcccggcaagcaggctgccgcgcagccccacacggagatcccagaaggaaccacagctgaagaagcaggcattggagacacccccagcctggaagacgaagctgctggtcacgtgacccaagaggagttgagagttccgggccggcagaggaaggcgcctgaaaggcccctggccaatgagattagcgcccacgtccagcctggaccctgcggagaggcctctggggtctctgggccgtgcctcggggagaaagagccagaagctcccgtcccgctgaccgcgagccttcctcagcaccgtcccgtttgcccagcgcctcctccaacaggaggccctcaggagccctccctggagtggggacaaaaaggcggggactgggccgagaagggtccggcctttccgaagcccgccaccactgcgtatctccacacagagcctgaaagtggtaaggtggtccaggaaggcttcctccgagagccaggccccccaggtctgagccaccagctcatgtccggcatgcctggggctcccctcctgcctgagggccccagagaggccacacgccaaccttcggggacaggacctgaggacacagagggcggccgccacgcccctgagctgctcaagcaccagcttctaggagacctgcaccaggaggggccgccgctgaagggggcagggggcaaagagaggccggggagcaaggaggaggtggatgaagaccgcgacgtcgatgagtcctccccccaagactcccctccctccaaggcctccccagcccaagatgggcggcctccccagacagccgccagagaagccaccagcatcccaggcttcccagcggagggtgccatccccctccctgtggatttcctctccaaagtttccacagagatcccagcctcagagcccgacgggcccagtgtagggcgggccaaagggcaggatgcccccctggagttcacgtttcacgtggaaatcacacccaacgtgcagaaggagcaggcgcactcggaggagcatttgggaagggctgcatttccaggggcccctggagaggggccagaggcccggggcccctctttgggagaggacacaaaagaggctgaccttccagagccctctgaaaagcagcctgctgctgctccgcgggggaagcccgtcagccgggtccctcaactcaaagctcgcatggtcagtaaaagcaaagacgggactggaagcgatgacaaaaaagccaagggggctgatggtaaaacgaagatcgccacaccgcggggagcagcccctccaggccagaagggccaggccaacgccaccaggattccagcaaaaaccccgcccgctccaaagacaccacccagctctggtgaacctccaaaatcaggggatcgcagcggctacagcagccccggctccccaggcactcccggcagccgctcccgcaccccgtcccttccaaccccacccacccgggagcccaagaaggtggcagtggtccgtactccacccaagtcgccgtcttccgccaagagccgcctgcagacagcccccgtgcccatgccagacctgaagaatgtcaagtccaagatcggctccactgagaacctgaagcaccagccgggaggcgggaaggtgcaaatagtctacaaaccagttgacctgagcaaggtgacctccaagtgtggctcattaggcaacatccatcataaaccaggaggtggccaggtggaagtaaaatctgagaagcttgacttcaaggacagagtccagtcgaagattgggtccctggacaatatcacccacgtccctggcggaggaaataaaaagattgaaacccacaagctgaccttccgcgagaacgccaaagccaagacagaccacggggcggagatcgtgtacaagtcgccagtggtgtctggggacacgtctccacggcatctcagcaatgtctcctccaccggcagcatcgacatggtagactcgccccagctcgccacgctagctgacgaggtgtctgcctccctggccaagcagggtttgtgatcaggcccctggggcggtcaataattgtggagaggagagaatgagagagtgtggaaaaaaaaagaataatgacccggcccccgccctctgcccccagctgctcctcgcagttcggttaattggttaatcacttaacctgcttttgtcactcggctttggctcgggacttcaaaatcagtgatgggagtaagagcaaatttcatctttccaaattgatgggtgggctagtaataaaatatttaaaaaaaaacattcaaaaacatggccacatccaacatttcctcaggcaattccttttgattcttttttcttccccctccatgtagaagagggagaaggagaggctctgaaagctgcttctgggggatttcaagggactgggggtgccaaccacctctggccctgttgtgggggtgtcacagaggcagtggcagcaacaaaggatttgaaacttggtgtgttcgtggagccacaggcagacgatgtcaaccttgtgtgagtgtgacgggggttggggtggggcgggaggccacgggggaggccgaggcaggggctgggcagaggggagaggaagcacaagaagtgggagtgggagaggaagccacgtgctggagagtagacatccccctccttgccgctgggagagccaaggcctatgccacctgcagcgtctgagcggccgcctgtccttggtggccgggggtgggggcctgctgtgggtcagtgtgccaccctctgcagggcagcctgtgggagaagggacagcgggtaaaaagagaaggcaagctggcaggagggtggcacttcgtggatgacctccttagaaaagactgaccttgatgtcttgagagcgctggcctcttcctccctccctgcagggtagggggcctgagttgaggggcttccctctgctccacagaaaccctgttttattgagttctgaaggttggaactgctgccatgattttggccactttgcagacctgggactttagggctaaccagttctctttgtaaggacttgtgcctcttgggagacgtccacccgtttccaagcctgggccactggcatctctggagtgtgtgggggtctgggaggcaggtcccgagccccctgtccttcccacggccactgcagtcaccccgtctgcgccgctgtgctgttgtctgccgtgagagcccaatcactgcctatacccctcatcacacgtcacaatgtcccgaattcccagcctcaccaccccttctcagtaatgaccctggttggttgcaggaggtacctactccatactgagggtgaaattaagggaaggcaaagtccaggcacaagagtgggaccccagcctctcactctcagttccactcatccaactgggaccctcaccacgaatctcatgatctgattcggttccctgtctcctcctcccgtcacagatgtgagccagggcactgctcagctgtgaccctaggtgtttctgccttgttgacatggagagagccctttcccctgagaaggcctggccccttcctgtgctgagcccacagcagcaggctgggtgtcttggttgtcagtggtggcaccaggatggaagggcaaggcacccagggcaggcccacagtcccgctgtcccccacttgcaccctagcttgtagctgccaacctcccagacagcccagcccgctgctcagctccacatgcatagtatcagccctccacacccgacaaaggggaacacacccccttggaaatggttcttttcccccagtcccagctggaagccatgctgtctgttctgctggagcagctgaacatatacatagatgttgccctgccctccccatctgcaccctgttgagttgtagttggatttgtctgtttatgcttggattcaccagagtgactatgatagtgaaaagaaaaaaaaaaaaaaaaaaggacgcatgtatcttgaaatgcttgtaaagaggtttctaacccaccctcacgaggtgtctctcacccccacactgggactcgtgtggcctgtgtggtgccaccctgctggggcctcccaagttttgaaaggctttcctcagcacctgggacccaacagagaccagcttctagcagctaaggaggccgttcagctgtgacgaaggcctgaagcacaggattaggactgaagcgatgatgtccccttccctacttccccttggggctccctgtgtcagggcacagactaggtcttgtggctggtctggcttgcggcgcgaggatggttctctctggtcatagcccgaagtctcatggcagtcccaaaggaggcttacaactcctgcatcacaagaaaaaggaagccactgccagctggggggatctgcagctcccagaagctccgtgagcctcagccacccctcagactgggttcctctccaagctcgccctctggaggggcagcgcagcctcccaccaagggccctgcgaccacagcagggattgggatgaattgcctgtcctggatctgctctagaggcccaagctgcctgcctgaggaaggatgacttgacaagtcaggagacactgttcccaaagccttgaccagagcacctcagcccgctgaccttgcacaaactccatctgctgccatgagaaaagggaagccgcctttgcaaaacattgctgcctaaagaaactcagcagcctcaggcccaattctgccacttctggtttgggtacagttaaaggcaaccctgagggacttggcagtagaaatccagggcctcccctggggctggcagcttcgtgtgcagctagagctttacctgaaaggaagtctctgggcccagaactctccaccaagagcctccctgccgttcgctgagtcccagcaattctcctaagttgaagggatctgagaaggagaaggaaatgtggggtagatttggtggtggttagagatatgcccccctcattactgccaacagtttcggctgcatttcttcacgcacctcggttcctcttcctgaagttcttgtgccctgctcttcagcaccatgggccttcttatacggaaggctctgggatctcccccttgtggggcaggctcttggggccagcctaagatcatggtttagggtgatcagtgctggcagataaattgaaaaggcacgctggcttgtgatcttaaatgaggacaatccccccagggctgggcactcctcccctcccctcacttctcccacctgcagagccagtgtccttgggtgggctagataggatatactgtatgccggctccttcaagctgctgactcactttatcaatagttccatttaaattgacttcagtggtgagactgtatcctgtttgctattgcttgttgtgctatggggggaggggggaggaatgtgtaagatagttaacatgggcaaagggagatcttggggtgcagcacttaaactgcctcgtaacccttttcatgatttcaaccacatttgctagagggagggagcagccacggagttagaggcccttggggtttctcttttccactgacaggctttcccaggcagctggctagttcattccctccccagccaggtgcaggcgtaggaatatggacatctggttgctttggcctgctgccctctttcaggggtcctaagcccacaatcatgcctccctaagaccttggcatccttccctctaagccgttggcacctctgtgccacctctcacactggctccagacacacagcctgtgcttttggagctgagatcactcgcttcaccctcctcatctttgttctccaagtaaagccacgaggtcggggcgagggcagaggtgatcacctgcgtgtcccatctacagacctgcagcttcataaaacttctgatttctcttcagctttgaaaagggttaccctgggcactggcctagagcctcacctcctaatagacttagccccatgagtttgccatgttgagcaggactatttctggcacttgcaagtcccatgatttcttcggtaattctgagggtggggggagggacatgaaatcatcttagcttagctttctgtctgtgaatgtctatatagtgtattgtgtgttttaacaaatgatttacactgactgttgctgtaaaagtgaatttggaaataaagttattactctgattaaa

SEQ ID NO: 301588 - RNA, 5837 nt, Homo sapiens
  source 1..5837: mol_type = mRNA
gcagtcaccgccacccaccagctccggcaccaacagcagcgccgctgccaccgcccaccttctgccgccgccaccacagccaccttctcctcctccgctgtcctctcccgtcctcgcctctgtcgactatcaggtgaactttgaaccaggatggctgagccccgccaggagttcgaagtgatggaagatcacgctgggacgtacgggttgggggacaggaaagatcaggggggctacaccatgcaccaagaccaagagggtgacacggacgctggcctgaaagaatctcccctgcagacccccactgaggacggatctgaggaaccgggctctgaaacctctgatgctaagagcactccaacagcggaagatgtgacagcacccttagtggatgagggagctcccggcaagcaggctgccgcgcagccccacacggagatcccagaaggaaccacagctgaagaagcaggcattggagacacccccagcctggaagacgaagctgctggtcacgtgacccaagctcgcatggtcagtaaaagcaaagacgggactggaagcgatgacaaaaaagccaagacatccacacgttcctctgctaaaaccttgaaaaataggccttgccttagccccaaacaccccactcctggtagctcagaccctctgatccaaccctccagccctgctgtgtgcccagagccaccttcctctcctaaatacgtctcttctgtcacttcccgaactggcagttctggagcaaaggagatgaaactcaagggggctgatggtaaaacgaagatcgccacaccgcggggagcagcccctccaggccagaagggccaggccaacgccaccaggattccagcaaaaaccccgcccgctccaaagacaccacccagctctggtgaacctccaaaatcaggggatcgcagcggctacagcagccccggctccccaggcactcccggcagccgctcccgcaccccgtcccttccaaccccacccacccgggagcccaagaaggtggcagtggtccgtactccacccaagtcgccgtcttccgccaagagccgcctgcagacagcccccgtgcccatgccagacctgaagaatgtcaagtccaagatcggctccactgagaacctgaagcaccagccgggaggcgggaaggtgcagataattaataagaagctggatcttagcaacgtccagtccaagtgtggctcaaaggataatatcaaacacgtcccgggaggcggcagtgtgcaaatagtctacaaaccagttgacctgagcaaggtgacctccaagtgtggctcattaggcaacatccatcataaaccaggaggtggccaggtggaagtaaaatctgagaagcttgacttcaaggacagagtccagtcgaagattgggtccctggacaatatcacccacgtccctggcggaggaaataaaaagattgaaacccacaagctgaccttccgcgagaacgccaaagccaagacagaccacggggcggagatcgtgtacaagtcgccagtggtgtctggggacacgtctccacggcatctcagcaatgtctcctccaccggcagcatcgacatggtagactcgccccagctcgccacgctagctgacgaggtgtctgcctccctggccaagcagggtttgtgatcaggcccctggggcggtcaataattgtggagaggagagaatgagagagtgtggaaaaaaaaagaataatgacccggcccccgccctctgcccccagctgctcctcgcagttcggttaattggttaatcacttaacctgcttttgtcactcggctttggctcgggacttcaaaatcagtgatgggagtaagagcaaatttcatctttccaaattgatgggtgggctagtaataaaatatttaaaaaaaaacattcaaaaacatggccacatccaacatttcctcaggcaattccttttgattcttttttcttccccctccatgtagaagagggagaaggagaggctctgaaagctgcttctgggggatttcaagggactgggggtgccaaccacctctggccctgttgtgggggtgtcacagaggcagtggcagcaacaaaggatttgaaacttggtgtgttcgtggagccacaggcagacgatgtcaaccttgtgtgagtgtgacgggggttggggtggggcgggaggccacgggggaggccgaggcaggggctgggcagaggggagaggaagcacaagaagtgggagtgggagaggaagccacgtgctggagagtagacatccccctccttgccgctgggagagccaaggcctatgccacctgcagcgtctgagcggccgcctgtccttggtggccgggggtgggggcctgctgtgggtcagtgtgccaccctctgcagggcagcctgtgggagaagggacagcgggtaaaaagagaaggcaagctggcaggagggtggcacttcgtggatgacctccttagaaaagactgaccttgatgtcttgagagcgctggcctcttcctccctccctgcagggtagggggcctgagttgaggggcttccctctgctccacagaaaccctgttttattgagttctgaaggttggaactgctgccatgattttggccactttgcagacctgggactttagggctaaccagttctctttgtaaggacttgtgcctcttgggagacgtccacccgtttccaagcctgggccactggcatctctggagtgtgtgggggtctgggaggcaggtcccgagccccctgtccttcccacggccactgcagtcaccccgtctgcgccgctgtgctgttgtctgccgtgagagcccaatcactgcctatacccctcatcacacgtcacaatgtcccgaattcccagcctcaccaccccttctcagtaatgaccctggttggttgcaggaggtacctactccatactgagggtgaaattaagggaaggcaaagtccaggcacaagagtgggaccccagcctctcactctcagttccactcatccaactgggaccctcaccacgaatctcatgatctgattcggttccctgtctcctcctcccgtcacagatgtgagccagggcactgctcagctgtgaccctaggtgtttctgccttgttgacatggagagagccctttcccctgagaaggcctggccccttcctgtgctgagcccacagcagcaggctgggtgtcttggttgtcagtggtggcaccaggatggaagggcaaggcacccagggcaggcccacagtcccgctgtcccccacttgcaccctagcttgtagctgccaacctcccagacagcccagcccgctgctcagctccacatgcatagtatcagccctccacacccgacaaaggggaacacacccccttggaaatggttcttttcccccagtcccagctggaagccatgctgtctgttctgctggagcagctgaacatatacatagatgttgccctgccctccccatctgcaccctgttgagttgtagttggatttgtctgtttatgcttggattcaccagagtgactatgatagtgaaaagaaaaaaaaaaaaaaaaaaggacgcatgtatcttgaaatgcttgtaaagaggtttctaacccaccctcacgaggtgtctctcacccccacactgggactcgtgtggcctgtgtggtgccaccctgctggggcctcccaagttttgaaaggctttcctcagcacctgggacccaacagagaccagcttctagcagctaaggaggccgttcagctgtgacgaaggcctgaagcacaggattaggactgaagcgatgatgtccccttccctacttccccttggggctccctgtgtcagggcacagactaggtcttgtggctggtctggcttgcggcgcgaggatggttctctctggtcatagcccgaagtctcatggcagtcccaaaggaggcttacaactcctgcatcacaagaaaaaggaagccactgccagctggggggatctgcagctcccagaagctccgtgagcctcagccacccctcagactgggttcctctccaagctcgccctctggaggggcagcgcagcctcccaccaagggccctgcgaccacagcagggattgggatgaattgcctgtcctggatctgctctagaggcccaagctgcctgcctgaggaaggatgacttgacaagtcaggagacactgttcccaaagccttgaccagagcacctcagcccgctgaccttgcacaaactccatctgctgccatgagaaaagggaagccgcctttgcaaaacattgctgcctaaagaaactcagcagcctcaggcccaattctgccacttctggtttgggtacagttaaaggcaaccctgagggacttggcagtagaaatccagggcctcccctggggctggcagcttcgtgtgcagctagagctttacctgaaaggaagtctctgggcccagaactctccaccaagagcctccctgccgttcgctgagtcccagcaattctcctaagttgaagggatctgagaaggagaaggaaatgtggggtagatttggtggtggttagagatatgcccccctcattactgccaacagtttcggctgcatttcttcacgcacctcggttcctcttcctgaagttcttgtgccctgctcttcagcaccatgggccttcttatacggaaggctctgggatctcccccttgtggggcaggctcttggggccagcctaagatcatggtttagggtgatcagtgctggcagataaattgaaaaggcacgctggcttgtgatcttaaatgaggacaatccccccagggctgggcactcctcccctcccctcacttctcccacctgcagagccagtgtccttgggtgggctagataggatatactgtatgccggctccttcaagctgctgactcactttatcaatagttccatttaaattgacttcagtggtgagactgtatcctgtttgctattgcttgttgtgctatggggggaggggggaggaatgtgtaagatagttaacatgggcaaagggagatcttggggtgcagcacttaaactgcctcgtaacccttttcatgatttcaaccacatttgctagagggagggagcagccacggagttagaggcccttggggtttctcttttccactgacaggctttcccaggcagctggctagttcattccctccccagccaggtgcaggcgtaggaatatggacatctggttgctttggcctgctgccctctttcaggggtcctaagcccacaatcatgcctccctaagaccttggcatccttccctctaagccgttggcacctctgtgccacctctcacactggctccagacacacagcctgtgcttttggagctgagatcactcgcttcaccctcctcatctttgttctccaagtaaagccacgaggtcggggcgagggcagaggtgatcacctgcgtgtcccatctacagacctgcagcttcataaaacttctgatttctcttcagctttgaaaagggttaccctgggcactggcctagagcctcacctcctaatagacttagccccatgagtttgccatgttgagcaggactatttctggcacttgcaagtcccatgatttcttcggtaattctgagggtggggggagggacatgaaatcatcttagcttagctttctgtctgtgaatgtctatatagtgtattgtgtgttttaacaaatgatttacactgactgttgctgtaaaagtgaatttggaaataaagttattactctgattaaa

SEQ ID NO: 301589 - RNA, 5663 nt, Homo sapiens
  source 1..5663: mol_type = mRNA
gcagtcaccgccacccaccagctccggcaccaacagcagcgccgctgccaccgcccaccttctgccgccgccaccacagccaccttctcctcctccgctgtcctctcccgtcctcgcctctgtcgactatcaggtgaactttgaaccaggatggctgagccccgccaggagttcgaagtgatggaagatcacgctgggacgtacgggttgggggacaggaaagatcaggggggctacaccatgcaccaagaccaagagggtgacacggacgctggcctgaaagctgaagaagcaggcattggagacacccccagcctggaagacgaagctgctggtcacgtgacccaagctcgcatggtcagtaaaagcaaagacgggactggaagcgatgacaaaaaagccaagacatccacacgttcctctgctaaaaccttgaaaaataggccttgccttagccccaaacaccccactcctggtagctcagaccctctgatccaaccctccagccctgctgtgtgcccagagccaccttcctctcctaaatacgtctcttctgtcacttcccgaactggcagttctggagcaaaggagatgaaactcaagggggctgatggtaaaacgaagatcgccacaccgcggggagcagcccctccaggccagaagggccaggccaacgccaccaggattccagcaaaaaccccgcccgctccaaagacaccacccagctctggtgaacctccaaaatcaggggatcgcagcggctacagcagccccggctccccaggcactcccggcagccgctcccgcaccccgtcccttccaaccccacccacccgggagcccaagaaggtggcagtggtccgtactccacccaagtcgccgtcttccgccaagagccgcctgcagacagcccccgtgcccatgccagacctgaagaatgtcaagtccaagatcggctccactgagaacctgaagcaccagccgggaggcgggaaggtgcagataattaataagaagctggatcttagcaacgtccagtccaagtgtggctcaaaggataatatcaaacacgtcccgggaggcggcagtgtgcaaatagtctacaaaccagttgacctgagcaaggtgacctccaagtgtggctcattaggcaacatccatcataaaccaggaggtggccaggtggaagtaaaatctgagaagcttgacttcaaggacagagtccagtcgaagattgggtccctggacaatatcacccacgtccctggcggaggaaataaaaagattgaaacccacaagctgaccttccgcgagaacgccaaagccaagacagaccacggggcggagatcgtgtacaagtcgccagtggtgtctggggacacgtctccacggcatctcagcaatgtctcctccaccggcagcatcgacatggtagactcgccccagctcgccacgctagctgacgaggtgtctgcctccctggccaagcagggtttgtgatcaggcccctggggcggtcaataattgtggagaggagagaatgagagagtgtggaaaaaaaaagaataatgacccggcccccgccctctgcccccagctgctcctcgcagttcggttaattggttaatcacttaacctgcttttgtcactcggctttggctcgggacttcaaaatcagtgatgggagtaagagcaaatttcatctttccaaattgatgggtgggctagtaataaaatatttaaaaaaaaacattcaaaaacatggccacatccaacatttcctcaggcaattccttttgattcttttttcttccccctccatgtagaagagggagaaggagaggctctgaaagctgcttctgggggatttcaagggactgggggtgccaaccacctctggccctgttgtgggggtgtcacagaggcagtggcagcaacaaaggatttgaaacttggtgtgttcgtggagccacaggcagacgatgtcaaccttgtgtgagtgtgacgggggttggggtggggcgggaggccacgggggaggccgaggcaggggctgggcagaggggagaggaagcacaagaagtgggagtgggagaggaagccacgtgctggagagtagacatccccctccttgccgctgggagagccaaggcctatgccacctgcagcgtctgagcggccgcctgtccttggtggccgggggtgggggcctgctgtgggtcagtgtgccaccctctgcagggcagcctgtgggagaagggacagcgggtaaaaagagaaggcaagctggcaggagggtggcacttcgtggatgacctccttagaaaagactgaccttgatgtcttgagagcgctggcctcttcctccctccctgcagggtagggggcctgagttgaggggcttccctctgctccacagaaaccctgttttattgagttctgaaggttggaactgctgccatgattttggccactttgcagacctgggactttagggctaaccagttctctttgtaaggacttgtgcctcttgggagacgtccacccgtttccaagcctgggccactggcatctctggagtgtgtgggggtctgggaggcaggtcccgagccccctgtccttcccacggccactgcagtcaccccgtctgcgccgctgtgctgttgtctgccgtgagagcccaatcactgcctatacccctcatcacacgtcacaatgtcccgaattcccagcctcaccaccccttctcagtaatgaccctggttggttgcaggaggtacctactccatactgagggtgaaattaagggaaggcaaagtccaggcacaagagtgggaccccagcctctcactctcagttccactcatccaactgggaccctcaccacgaatctcatgatctgattcggttccctgtctcctcctcccgtcacagatgtgagccagggcactgctcagctgtgaccctaggtgtttctgccttgttgacatggagagagccctttcccctgagaaggcctggccccttcctgtgctgagcccacagcagcaggctgggtgtcttggttgtcagtggtggcaccaggatggaagggcaaggcacccagggcaggcccacagtcccgctgtcccccacttgcaccctagcttgtagctgccaacctcccagacagcccagcccgctgctcagctccacatgcatagtatcagccctccacacccgacaaaggggaacacacccccttggaaatggttcttttcccccagtcccagctggaagccatgctgtctgttctgctggagcagctgaacatatacatagatgttgccctgccctccccatctgcaccctgttgagttgtagttggatttgtctgtttatgcttggattcaccagagtgactatgatagtgaaaagaaaaaaaaaaaaaaaaaaggacgcatgtatcttgaaatgcttgtaaagaggtttctaacccaccctcacgaggtgtctctcacccccacactgggactcgtgtggcctgtgtggtgccaccctgctggggcctcccaagttttgaaaggctttcctcagcacctgggacccaacagagaccagcttctagcagctaaggaggccgttcagctgtgacgaaggcctgaagcacaggattaggactgaagcgatgatgtccccttccctacttccccttggggctccctgtgtcagggcacagactaggtcttgtggctggtctggcttgcggcgcgaggatggttctctctggtcatagcccgaagtctcatggcagtcccaaaggaggcttacaactcctgcatcacaagaaaaaggaagccactgccagctggggggatctgcagctcccagaagctccgtgagcctcagccacccctcagactgggttcctctccaagctcgccctctggaggggcagcgcagcctcccaccaagggccctgcgaccacagcagggattgggatgaattgcctgtcctggatctgctctagaggcccaagctgcctgcctgaggaaggatgacttgacaagtcaggagacactgttcccaaagccttgaccagagcacctcagcccgctgaccttgcacaaactccatctgctgccatgagaaaagggaagccgcctttgcaaaacattgctgcctaaagaaactcagcagcctcaggcccaattctgccacttctggtttgggtacagttaaaggcaaccctgagggacttggcagtagaaatccagggcctcccctggggctggcagcttcgtgtgcagctagagctttacctgaaaggaagtctctgggcccagaactctccaccaagagcctccctgccgttcgctgagtcccagcaattctcctaagttgaagggatctgagaaggagaaggaaatgtggggtagatttggtggtggttagagatatgcccccctcattactgccaacagtttcggctgcatttcttcacgcacctcggttcctcttcctgaagttcttgtgccctgctcttcagcaccatgggccttcttatacggaaggctctgggatctcccccttgtggggcaggctcttggggccagcctaagatcatggtttagggtgatcagtgctggcagataaattgaaaaggcacgctggcttgtgatcttaaatgaggacaatccccccagggctgggcactcctcccctcccctcacttctcccacctgcagagccagtgtccttgggtgggctagataggatatactgtatgccggctccttcaagctgctgactcactttatcaatagttccatttaaattgacttcagtggtgagactgtatcctgtttgctattgcttgttgtgctatggggggaggggggaggaatgtgtaagatagttaacatgggcaaagggagatcttggggtgcagcacttaaactgcctcgtaacccttttcatgatttcaaccacatttgctagagggagggagcagccacggagttagaggcccttggggtttctcttttccactgacaggctttcccaggcagctggctagttcattccctccccagccaggtgcaggcgtaggaatatggacatctggttgctttggcctgctgccctctttcaggggtcctaagcccacaatcatgcctccctaagaccttggcatccttccctctaagccgttggcacctctgtgccacctctcacactggctccagacacacagcctgtgcttttggagctgagatcactcgcttcaccctcctcatctttgttctccaagtaaagccacgaggtcggggcgagggcagaggtgatcacctgcgtgtcccatctacagacctgcagcttcataaaacttctgatttctcttcagctttgaaaagggttaccctgggcactggcctagagcctcacctcctaatagacttagccccatgagtttgccatgttgagcaggactatttctggcacttgcaagtcccatgatttcttcggtaattctgagggtggggggagggacatgaaatcatcttagcttagctttctgtctgtgaatgtctatatagtgtattgtgtgttttaacaaatgatttacactgactgttgctgtaaaagtgaatttggaaataaagttattactctgattaaa

SEQ ID NO: 301590 - DNA, 18 bp, synthetic construct
  source 1..18: mol_type = other DNA
ccgttttcttaccaccct

SEQ ID NO: 301591 - DNA, 23 bp, synthetic construct
  source 1..23: mol_type = other DNA
tccacttggcaaaccgatcacag

SEQ ID NO: 301592 - DNA, 23 bp, synthetic construct
  source 1..23: mol_type = other DNA
gtccacttggcaaaccgatcaca

SEQ ID NO: 301593 - DNA, 23 bp, synthetic construct
  source 1..23: mol_type = other DNA
ccacttggcaaaccgatcacagc

SEQ ID NO: 301594 - DNA, 23 bp, synthetic construct
  source 1..23: mol_type = other DNA
agtccacttggcaaaccgatcac

SEQ ID NO: 301595 - DNA, 23 bp, synthetic construct
  source 1..23: mol_type = other DNA
tccacttggcaaaccgatcacag

SEQ ID NO: 301596 - DNA, 23 bp, synthetic construct
  source 1..23: mol_type = other DNA
gtccacttggcaaaccgatcaca

SEQ ID NO: 301597 - DNA, 23 bp, synthetic construct
  source 1..23: mol_type = other DNA
ccacttggcaaaccgatcacagc

SEQ ID NO: 301598 - DNA, 23 bp, synthetic construct
  source 1..23: mol_type = other DNA
agtccacttggcaaaccgatcac

SEQ ID NO: 301599 - DNA, 20 bp, synthetic construct
  source 1..20: mol_type = other DNA
ccacttggcaaaccgatcac

SEQ ID NO: 301600 - DNA, 20 bp, synthetic construct
  source 1..20: mol_type = other DNA
gcccatcatacacagcaaag

SEQ ID NO: 301601 - DNA, 20 bp, synthetic construct
  source 1..20: mol_type = other DNA
gctaactggtttgcccttgc

SEQ ID NO: 301602 - DNA, 20 bp, synthetic construct
  source 1..20: mol_type = other DNA
gtgggatacaaattctaggc

SEQ ID NO: 301603 - DNA, 20 bp, synthetic construct
  source 1..20: mol_type = other DNA
ggagctggagaaccatgagc

SEQ ID NO: 301604 - DNA, 20 bp, synthetic construct
  source 1..20: mol_type = other DNA
tgtacttcacatttggagcc

SEQ ID NO: 301605 - DNA, 20 bp, synthetic construct
  source 1..20: mol_type = other DNA
  modified_base 8: mod_base = OTHER; note = 5-methylcytosine
  modified_base 13: mod_base = OTHER; note = 5-methylcytosine
caggatacatttctacagct

SEQ ID NO: 301606 - DNA, 18 bp, synthetic construct
  source 1..18: mol_type = other DNA
ccgttttcttaccaccct

SEQ ID NO: 301607 - DNA, 20 bp, synthetic construct
  source 1..20: mol_type = other DNA
ccgttttcttaccaccctaa

SEQ ID NO: 301608-301691 - skipped (84 entries)

SEQ ID NO: 301692 - DNA, 20 bp, synthetic construct
  source 1..20: mol_type = other DNA
  modified_base 3: mod_base = OTHER; note = A nucleoside-replacement group comprising a non-sugar substitute wherein the non-sugar substitute does not contain a ketone, aldehyde, ketal, hemiketal, acetal, hemiacetal, aminal or hemiaminal moiety and is incapable of forming a covalent bond with a nucleotide base
ccncttggcaaaccgatcac

SEQ ID NO: 301693 - DNA, 20 bp, synthetic construct
  source 1..20: mol_type = other DNA
  modified_base 5: mod_base = OTHER; note = A nucleoside-replacement group comprising a non-sugar substitute wherein the non-sugar substitute does not contain a ketone, aldehyde, ketal, hemiketal, acetal, hemiacetal, aminal or hemiaminal moiety and is incapable of forming a covalent bond with a nucleotide base
ccacntggcaaaccgatcac

SEQ ID NO: 301694 - DNA, 20 bp, synthetic construct
  source 1..20: mol_type = other DNA
  modified_base 16: mod_base = OTHER; note = A nucleoside-replacement group comprising a non-sugar substitute wherein the non-sugar substitute does not contain a ketone, aldehyde, ketal, hemiketal, acetal, hemiacetal, aminal or hemiaminal moiety and is incapable of forming a covalent bond with a nucleotide base
ccacttggcaaaccgntcac

SEQ ID NO: 301695 - DNA, 20 bp, synthetic construct
  source 1..20: mol_type = other DNA
  modified_base 8: mod_base = OTHER; note = A nucleoside-replacement group comprising a non-sugar substitute wherein the non-sugar substitute does not contain a ketone, aldehyde, ketal, hemiketal, acetal, hemiacetal, aminal or hemiaminal moiety and is incapable of forming a covalent bond with a nucleotide base
ccacttgncaaaccgatcac

SEQ ID NO: 301696 - DNA, 20 bp, synthetic construct
  source 1..20: mol_type = other DNA
  modified_base 13: mod_base = OTHER; note = A nucleoside-replacement group comprising a non-sugar substitute wherein the non-sugar substitute does not contain a ketone, aldehyde, ketal, hemiketal, acetal, hemiacetal, aminal or hemiaminal moiety and is incapable of forming a covalent bond with a nucleotide base
ccacttggcaaancgatcac

SEQ ID NO: 301697 - DNA, 20 bp, synthetic construct
  source 1..20: mol_type = other DNA
  modified_base 11: mod_base = OTHER; note = A nucleoside-replacement group comprising a non-sugar substitute wherein the non-sugar substitute does not contain a ketone, aldehyde, ketal, hemiketal, acetal, hemiacetal, aminal or hemiaminal moiety and is incapable of forming a covalent bond with a nucleotide base
ccacttggcanaccgatcac

SEQ ID NO: 301698 - DNA, 20 bp, synthetic construct
  source 1..20: mol_type = other DNA
  modified_base 19: mod_base = OTHER; note = A nucleoside-replacement group comprising a non-sugar substitute wherein the non-sugar substitute does not contain a ketone, aldehyde, ketal, hemiketal, acetal, hemiacetal, aminal or hemiaminal moiety and is incapable of forming a covalent bond with a nucleotide base
ccacttggcaaaccgatcnc

SEQ ID NO: 301699 - DNA, 20 bp, synthetic construct
  source 1..20: mol_type = other DNA
  modified_base 11: mod_base = OTHER; note = A nucleoside-replacement group comprising a non-sugar substitute wherein the non-sugar substitute does not contain a ketone, aldehyde, ketal, hemiketal, acetal, hemiacetal, aminal or hemiaminal moiety and is incapable of forming a covalent bond with a nucleotide base
  modified_base 19: mod_base = OTHER; note = A nucleoside-replacement group comprising a non-sugar substitute wherein the non-sugar substitute does not contain a ketone, aldehyde, ketal, hemiketal, acetal, hemiacetal, aminal or hemiaminal moiety and is incapable of forming a covalent bond with a nucleotide base
ccacttggcanaccgatcnc

SEQ ID NO: 301700 - DNA, 20 bp, synthetic construct
  source 1..20: mol_type = other DNA
  modified_base 7: mod_base = OTHER; note = A nucleoside-replacement group comprising a non-sugar substitute wherein the non-sugar substitute does not contain a ketone, aldehyde, ketal, hemiketal, acetal, hemiacetal, aminal or hemiaminal moiety and is incapable of forming a covalent bond with a nucleotide base
ccacttngcaaaccgatcac

SEQ ID NO: 301701 - DNA, 20 bp, synthetic construct
  source 1..20: mol_type = other DNA
  modified_base 1: mod_base = OTHER; note = A nucleoside-replacement group comprising a non-sugar substitute wherein the non-sugar substitute does not contain a ketone, aldehyde, ketal, hemiketal, acetal, hemiacetal, aminal or hemiaminal moiety and is incapable of forming a covalent bond with a nucleotide base
ncacttggcaaaccgatcac

SEQ ID NO: 301702 - DNA, 20 bp, synthetic construct
  source 1..20: mol_type = other DNA
  modified_base 2: mod_base = OTHER; note = A nucleoside-replacement group comprising a non-sugar substitute wherein the non-sugar substitute does not contain a ketone, aldehyde, ketal, hemiketal, acetal, hemiacetal, aminal or hemiaminal moiety and is incapable of forming a covalent bond with a nucleotide base
cnacttggcaaaccgatcac

SEQ ID NO: 301703 - DNA, 20 bp, synthetic construct
  source 1..20: mol_type = other DNA
  modified_base 4: mod_base = OTHER; note = A nucleoside-replacement group comprising a non-sugar substitute wherein the non-sugar substitute does not contain a ketone, aldehyde, ketal, hemiketal, acetal, hemiacetal, aminal or hemiaminal moiety and is incapable of forming a covalent bond with a nucleotide base
ccanttggcaaaccgatcac

SEQ ID NO: 301704 - DNA, 20 bp, synthetic construct
  source 1..20: mol_type = other DNA
  modified_base 6: mod_base = OTHER; note = A nucleoside-replacement group comprising a non-sugar substitute wherein the non-sugar substitute does not contain a ketone, aldehyde, ketal, hemiketal, acetal, hemiacetal, aminal or hemiaminal moiety and is incapable of forming a covalent bond with a nucleotide base
ccactnggcaaaccgatcac

SEQ ID NO: 301705 - DNA, 20 bp, synthetic construct
  source 1..20: mol_type = other DNA
  modified_base 9: mod_base = OTHER; note = A nucleoside-replacement group comprising a non-sugar substitute wherein the non-sugar substitute does not contain a ketone, aldehyde, ketal, hemiketal, acetal, hemiacetal, aminal or hemiaminal moiety and is incapable of forming a covalent bond with a nucleotide base
ccacttggnaaaccgatcac

SEQ ID NO: 301706 - DNA, 20 bp, synthetic construct
  source 1..20: mol_type = other DNA
  modified_base 10: mod_base = OTHER; note = A nucleoside-replacement group comprising a non-sugar substitute wherein the non-sugar substitute does not contain a ketone, aldehyde, ketal, hemiketal, acetal, hemiacetal, aminal or hemiaminal moiety and is incapable of forming a covalent bond with a nucleotide base
ccacttggcnaaccgatcac

SEQ ID NO: 301707 - DNA, 20 bp, synthetic construct
  source 1..20: mol_type = other DNA
  modified_base 12: mod_base = OTHER; note = A nucleoside-replacement group comprising a non-sugar substitute wherein the non-sugar substitute does not contain a ketone, aldehyde, ketal, hemiketal, acetal, hemiacetal, aminal or hemiaminal moiety and is incapable of forming a covalent bond with a nucleotide base
ccacttggcaanccgatcac

SEQ ID NO: 301708 - DNA, 20 bp, synthetic construct
  source 1..20: mol_type = other DNA
  modified_base 14: mod_base = OTHER; note = A nucleoside-replacement group comprising a non-sugar substitute wherein the non-sugar substitute does not contain a ketone, aldehyde, ketal, hemiketal, acetal, hemiacetal, aminal or hemiaminal moiety and is incapable of forming a covalent bond with a nucleotide base
ccacttggcaaacngatcac

SEQ ID NO: 301709 - DNA, 20 bp, synthetic construct
  source 1..20: mol_type = other DNA
  modified_base 15: mod_base = OTHER; note = A nucleoside-replacement group comprising a non-sugar substitute wherein the non-sugar substitute does not contain a ketone, aldehyde, ketal, hemiketal, acetal, hemiacetal, aminal or hemiaminal moiety and is incapable of forming a covalent bond with a nucleotide base
ccacttggcaaaccnatcac

SEQ ID NO: 301710 - DNA, 20 bp, synthetic construct
  source 1..20: mol_type = other DNA
  modified_base 17: mod_base = OTHER; note = A nucleoside-replacement group comprising a non-sugar substitute wherein the non-sugar substitute does not contain a ketone, aldehyde, ketal, hemiketal, acetal, hemiacetal, aminal or hemiaminal moiety and is incapable of forming a covalent bond with a nucleotide base
ccacttggcaaaccgancac

SEQ ID NO: 301711 - DNA, 20 bp, synthetic construct
  source 1..20: mol_type = other DNA
  modified_base 18: mod_base = OTHER; note = A nucleoside-replacement group comprising a non-sugar substitute wherein the non-sugar substitute does not contain a ketone, aldehyde, ketal, hemiketal, acetal, hemiacetal, aminal or hemiaminal moiety and is incapable of forming a covalent bond with a nucleotide base
ccacttggcaaaccgatnac

SEQ ID NO: 301712 - DNA, 20 bp, synthetic construct
  source 1..20: mol_type = other DNA
  modified_base 20: mod_base = OTHER; note = A nucleoside-replacement group comprising a non-sugar substitute wherein the non-sugar substitute does not contain a ketone, aldehyde, ketal, hemiketal, acetal, hemiacetal, aminal or hemiaminal moiety and is incapable of forming a covalent bond with a nucleotide base
ccacttggcaaaccgatcan

SEQ ID NO: 301713 - DNA, 20 bp, synthetic construct
  source 1..20: mol_type = other DNA
  modified_base 3: mod_base = OTHER; note = A nucleoside-replacement group comprising a non-sugar substitute wherein the non-sugar substitute does not contain a ketone, aldehyde, ketal, hemiketal, acetal, hemiacetal, aminal or hemiaminal moiety and is incapable of forming a covalent bond with a nucleotide base
gcncatcatacacagcaaag

SEQ ID NO: 301714 - DNA, 20 bp, synthetic construct
  source 1..20: mol_type = other DNA
  modified_base 5: mod_base = OTHER; note = A nucleoside-replacement group comprising a non-sugar substitute wherein the non-sugar substitute does not contain a ketone, aldehyde, ketal, hemiketal, acetal, hemiacetal, aminal or hemiaminal moiety and is incapable of forming a covalent bond with a nucleotide base
gcccntcatacacagcaaag

SEQ ID NO: 301715 - DNA, 20 bp, synthetic construct
  source 1..20: mol_type = other DNA
  modified_base 16: mod_base = OTHER; note = A nucleoside-replacement group comprising a non-sugar substitute wherein the non-sugar substitute does not contain a ketone, aldehyde, ketal, hemiketal, acetal, hemiacetal, aminal or hemiaminal moiety and is incapable of forming a covalent bond with a nucleotide base
gcccatcatacacagnaaag

SEQ ID NO: 301716 - DNA, 20 bp, synthetic construct
  source 1..20: mol_type = other DNA
  modified_base 8: mod_base = OTHER; note = A nucleoside-replacement group comprising a non-sugar substitute wherein the non-sugar substitute does not contain a ketone, aldehyde, ketal, hemiketal, acetal, hemiacetal, aminal or hemiaminal moiety and is incapable of forming a covalent bond with a nucleotide base
gcccatcntacacagcaaag

SEQ ID NO: 301717 - DNA, 20 bp, synthetic construct
  source 1..20: mol_type = other DNA
  modified_base 13: mod_base = OTHER; note = A nucleoside-replacement group comprising a non-sugar substitute wherein the non-sugar substitute does not contain a ketone, aldehyde, ketal, hemiketal, acetal, hemiacetal, aminal or hemiaminal moiety and is incapable of forming a covalent bond with a nucleotide base
gcccatcatacanagcaaag

SEQ ID NO: 301718 - DNA, 20 bp, synthetic construct
  source 1..20: mol_type = other DNA
  modified_base 11: mod_base = OTHER; note = A nucleoside-replacement group comprising a non-sugar substitute wherein the non-sugar substitute does not contain a ketone, aldehyde, ketal, hemiketal, acetal, hemiacetal, aminal or hemiaminal moiety and is incapable of forming a covalent bond with a nucleotide base
gcccatcatanacagcaaag

SEQ ID NO: 301719 - DNA, 20 bp, synthetic construct
  source 1..20: mol_type = other DNA
  modified_base 19: mod_base = OTHER; note = A nucleoside-replacement group comprising a non-sugar substitute wherein the non-sugar substitute does not contain a ketone, aldehyde, ketal, hemiketal, acetal, hemiacetal, aminal or hemiaminal moiety and is incapable of forming a covalent bond with a nucleotide base
gcccatcatacacagcaang

SEQ ID NO: 301720 - DNA, 20 bp, synthetic construct
  source 1..20: mol_type = other DNA
  modified_base 8: mod_base = OTHER; note = A nucleoside-replacement group comprising a non-sugar substitute wherein the non-sugar substitute does not contain a ketone, aldehyde, ketal, hemiketal, acetal, hemiacetal, aminal or hemiaminal moiety and is incapable of forming a covalent bond with a nucleotide base
  modified_base 16: mod_base = OTHER; note = A nucleoside-replacement group comprising a non-sugar substitute wherein the non-sugar substitute does not contain a ketone, aldehyde, ketal, hemiketal, acetal, hemiacetal, aminal or hemiaminal moiety and is incapable of forming a covalent bond with a nucleotide base
gcccatcntacacagnaaag

SEQ ID NO: 301721 - DNA, 20 bp, synthetic construct
  source 1..20: mol_type = other DNA
  modified_base 11: mod_base = OTHER; note = A nucleoside-replacement group comprising a non-sugar substitute wherein the non-sugar substitute does not contain a ketone, aldehyde, ketal, hemiketal, acetal, hemiacetal, aminal or hemiaminal moiety and is incapable of forming a covalent bond with a nucleotide base
  modified_base 19: mod_base = OTHER; note = A nucleoside-replacement group comprising a non-sugar substitute wherein the non-sugar substitute does not contain a ketone, aldehyde, ketal, hemiketal, acetal, hemiacetal, aminal or hemiaminal moiety and is incapable of forming a covalent bond with a nucleotide base
gcccatcatanacagcaang

SEQ ID NO: 301722 - DNA, 20 bp, synthetic construct
  source 1..20: mol_type = other DNA
  modified_base 7: mod_base = OTHER; note = A nucleoside-replacement group comprising a non-sugar substitute wherein the non-sugar substitute does not contain a ketone, aldehyde, ketal, hemiketal, acetal, hemiacetal, aminal or hemiaminal moiety and is incapable of forming a covalent bond with a nucleotide base
gcccatnatacacagcaaag

SEQ ID NO: 301723 - DNA, 23 bp, synthetic construct
  source 1..23: mol_type = other DNA
gtccacttggcaaaccgatcaca

SEQ ID NO: 301724 - DNA, 23 bp, synthetic construct
  source 1..23: mol_type = other DNA
ccacttggcaaaccgatcacagc

SEQ ID NO: 301725 - DNA, 23 bp, synthetic construct
  source 1..23: mol_type = other DNA
  modified_base 8: mod_base = OTHER; note = A nucleoside-replacement group comprising a non-sugar substitute wherein the non-sugar substitute does not contain a ketone, aldehyde, ketal, hemiketal, acetal, hemiacetal, aminal or hemiaminal moiety and is incapable of forming a covalent bond with a nucleotide base
  modified_base 16: mod_base = OTHER; note = A nucleoside-replacement group comprising a non-sugar substitute wherein the non-sugar substitute does not contain a ketone, aldehyde, ketal, hemiketal, acetal, hemiacetal, aminal or hemiaminal moiety and is incapable of forming a covalent bond with a nucleotide base
agtccacntggcaaancgatcac

SEQ ID NO: 301726 - DNA, 23 bp, synthetic construct
  source 1..23: mol_type = other DNA
  modified_base 8: mod_base = OTHER; note = A nucleoside-replacement group comprising a non-sugar substitute wherein the non-sugar substitute does not contain a ketone, aldehyde, ketal, hemiketal, acetal, hemiacetal, aminal or hemiaminal moiety and is incapable of forming a covalent bond with a nucleotide base
  modified_base 16: mod_base = OTHER; note = A nucleoside-replacement group comprising a non-sugar substitute wherein the non-sugar substitute does not contain a ketone, aldehyde, ketal, hemiketal, acetal, hemiacetal, aminal or hemiaminal moiety and is incapable of forming a covalent bond with a nucleotide base
tccacttngcaaaccnatcacag

SEQ ID NO: 301727 - DNA, 23 bp, synthetic construct
  source 1..23: mol_type = other DNA
  modified_base 8: mod_base = OTHER; note = A nucleoside-replacement group comprising a non-sugar substitute wherein the non-sugar substitute does not contain a ketone, aldehyde, ketal, hemiketal, acetal, hemiacetal, aminal or hemiaminal moiety and is incapable of forming a covalent bond with a nucleotide base
  modified_base 16: mod_base = OTHER; note = A nucleoside-replacement group comprising a non-sugar substitute wherein the non-sugar substitute does not contain a ketone, aldehyde, ketal, hemiketal, acetal, hemiacetal, aminal or hemiaminal moiety and is incapable of forming a covalent bond with a nucleotide base
gtccactnggcaaacngatcaca

SEQ ID NO: 301728 - DNA, 23 bp, synthetic construct
  source 1..23: mol_type = other DNA
  modified_base 8: mod_base = OTHER; note = A nucleoside-replacement group comprising a non-sugar substitute wherein the non-sugar substitute does not contain a ketone, aldehyde, ketal, hemiketal, acetal, hemiacetal, aminal or hemiaminal moiety and is incapable of forming a covalent bond with a nucleotide base
  modified_base 16: mod_base = OTHER; note = A nucleoside-replacement group comprising a non-sugar substitute wherein the non-sugar substitute does not contain a ketone, aldehyde, ketal, hemiketal, acetal, hemiacetal, aminal or hemiaminal moiety and is incapable of forming a covalent bond with a nucleotide base
ccacttgncaaaccgntcacagc

SEQ ID NO: 301729 - DNA, 20 bp, synthetic construct
  source 1..20: mol_type = other DNA
  modified_base 11: mod_base = OTHER; note = A nucleoside-replacement group comprising a non-sugar substitute wherein the non-sugar substitute does not contain a ketone, aldehyde, ketal, hemiketal, acetal, hemiacetal, aminal or hemiaminal moiety and is incapable of forming a covalent bond with a nucleotide base
gctaactggtntgcccttgc

SEQ ID NO: 301730 - DNA, 20 bp, synthetic construct
  source 1..20: mol_type = other DNA
  modified_base 11: mod_base = OTHER; note = A nucleoside-replacement group comprising a non-sugar substitute wherein the non-sugar substitute does not contain a ketone, aldehyde, ketal, hemiketal, acetal, hemiacetal, aminal or hemiaminal moiety and is incapable of forming a covalent bond with a nucleotide base
gtgggatacanattctaggc

SEQ ID NO: 301731 - DNA, 20 bp, synthetic construct
  source 1..20: mol_type = other DNA
  modified_base 11: mod_base = OTHER; note = A nucleoside-replacement group comprising a non-sugar substitute wherein the non-sugar substitute does not contain a ketone, aldehyde, ketal, hemiketal, acetal, hemiacetal, aminal or hemiaminal moiety and is incapable of forming a covalent bond with a nucleotide base
ggagctggagnaccatgagc

SEQ ID NO: 301732 - DNA, 20 bp, synthetic construct
  source 1..20: mol_type = other DNA
  modified_base 11: mod_base = OTHER; note = A nucleoside-replacement group comprising a non-sugar substitute wherein the non-sugar substitute does not contain a ketone, aldehyde, ketal, hemiketal, acetal, hemiacetal, aminal or hemiaminal moiety and is incapable of forming a covalent bond with a nucleotide base
tgtacttcacntttggagcc

SEQ ID NO: 301733 - DNA, 20 bp, synthetic construct
  source 1..20: mol_type = other DNA
  modified_base 5: mod_base = OTHER; note = A nucleoside-replacement group comprising a non-sugar substitute wherein the non-sugar substitute does not contain a ketone, aldehyde, ketal, hemiketal, acetal, hemiacetal, aminal or hemiaminal moiety and is incapable of forming a covalent bond with a nucleotide base
  modified_base 8: mod_base = OTHER; note = 5-methylcytosine
  modified_base 13: mod_base = OTHER; note = 5-methylcytosine
caggntanatttntacagct

SEQ ID NO: 301734 - DNA, 20 bp, synthetic construct
  source 1..20: mol_type = other DNA
  modified_base 8: mod_base = OTHER; note = 5-methylcytosine
  modified_base 13: mod_base = OTHER; note = 5-methylcytosine
  modified_base 17: mod_base = OTHER; note = A nucleoside-replacement group comprising a non-sugar substitute wherein the non-sugar substitute does not contain a ketone, aldehyde, ketal, hemiketal, acetal, hemiacetal, aminal or hemiaminal moiety and is incapable of forming a covalent bond with a nucleotide base
caggatacatttctacngct

SEQ ID NO: 301735 - DNA, 20 bp, synthetic construct
  source 1..20: mol_type = other DNA
  modified_base 8: mod_base = OTHER; note = 5-methylcytosine
  modified_base 11: mod_base = OTHER; note = A nucleoside-replacement group comprising a non-sugar substitute wherein the non-sugar substitute does not contain a ketone, aldehyde, ketal, hemiketal, acetal, hemiacetal, aminal or hemiaminal moiety and is incapable of forming a covalent bond with a nucleotide base
  modified_base 13: mod_base = OTHER; note = 5-methylcytosine
caggatacatntctacagct

SEQ ID NO: 301736 - DNA, 20 bp, synthetic construct
  source 1..20: mol_type = other DNA
  modified_base 7: mod_base = OTHER; note = A nucleoside-replacement group comprising a non-sugar substitute wherein the non-sugar substitute does not contain a ketone, aldehyde, ketal, hemiketal, acetal, hemiacetal, aminal or hemiaminal moiety and is incapable of forming a covalent bond with a nucleotide base
  modified_base 8: mod_base = OTHER; note = 5-methylcytosine
  modified_base 13: mod_base = OTHER; note = 5-methylcytosine
  modified_base 15: mod_base = OTHER; note = A nucleoside-replacement group comprising a non-sugar substitute wherein the non-sugar substitute does not contain a ketone, aldehyde, ketal, hemiketal, acetal, hemiacetal, aminal or hemiaminal moiety and is incapable of forming a covalent bond with a nucleotide base
caggatncatttctncagct

SEQ ID NO: 301737 - DNA, 20 bp, synthetic construct
  source 1..20: mol_type = other DNA
  modified_base 5: mod_base = OTHER; note = A nucleoside-replacement group comprising a non-sugar substitute wherein the non-sugar substitute does not contain a ketone, aldehyde, ketal, hemiketal, acetal, hemiacetal, aminal or hemiaminal moiety and is incapable of forming a covalent bond with a nucleotide base
  modified_base 8: mod_base = OTHER; note = 5-methylcytosine
  modified_base 13: mod_base = OTHER; note = 5-methylcytosine
  modified_base 17: mod_base = OTHER; note = A nucleoside-replacement group comprising a non-sugar substitute wherein the non-sugar substitute does not contain a ketone, aldehyde, ketal, hemiketal, acetal, hemiacetal, aminal or hemiaminal moiety and is incapable of forming a covalent bond with a nucleotide base
caggntacatttctacngct

SEQ ID NO: 301738 - DNA, 18 bp, synthetic construct
  source 1..18: mol_type = other DNA
  modified_base 11: mod_base = OTHER; note = A nucleoside-replacement group comprising a non-sugar substitute wherein the non-sugar substitute does not contain a ketone, aldehyde, ketal, hemiketal, acetal, hemiacetal, aminal or hemiaminal moiety and is incapable of forming a covalent bond with a nucleotide base
ccgttttcttnccaccct

SEQ ID NO: 301739 - DNA, 18 bp, synthetic construct
  source 1..18: mol_type = other DNA
  modified_base 9: mod_base = OTHER; note = A nucleoside-replacement group comprising a non-sugar substitute wherein the non-sugar substitute does not contain a ketone, aldehyde, ketal, hemiketal, acetal, hemiacetal, aminal or hemiaminal moiety and is incapable of forming a covalent bond with a nucleotide base
ccgttttcntaccaccct

SEQ ID NO: 301740 - DNA, 18 bp, synthetic construct
  source 1..18: mol_type = other DNA
  modified_base 10: mod_base = OTHER; note = A nucleoside-replacement group comprising a non-sugar substitute wherein the non-sugar substitute does not contain a ketone, aldehyde, ketal, hemiketal, acetal, hemiacetal, aminal or hemiaminal moiety and is incapable of forming a covalent bond with a nucleotide base
ccgttttctnaccaccct

SEQ ID NO: 301741 - DNA, 20 bp, synthetic construct
  source 1..20: mol_type = other DNA
  modified_base 11: mod_base = OTHER; note = A nucleoside-replacement group comprising a non-sugar substitute wherein the non-sugar substitute does not contain a ketone, aldehyde, ketal, hemiketal, acetal, hemiacetal, aminal or hemiaminal moiety and is incapable of forming a covalent bond with a nucleotide base
ccgttttcttnccaccctaa

SEQ ID NO: 301742 - DNA, 20 bp, synthetic construct
  source 1..20: mol_type = other DNA
  modified_base 8: mod_base = OTHER; note = A nucleoside-replacement group comprising a non-sugar substitute wherein the non-sugar substitute does not contain a ketone, aldehyde, ketal, hemiketal, acetal, hemiacetal, aminal or hemiaminal moiety and is incapable of forming a covalent bond with a nucleotide base
  modified_base 16: mod_base = OTHER; note = A nucleoside-replacement group comprising a non-sugar substitute wherein the non-sugar substitute does not contain a ketone, aldehyde, ketal, hemiketal, acetal, hemiacetal, aminal or hemiaminal moiety and is incapable of forming a covalent bond with a nucleotide base
ccacttgncaaaccgntcac
